United States Patent Application Publication US 2006/0003958 A1 - sequence listing, part 2

SEQ ID NO: 3354 - DNA, 610 bp, Cricetulus griseus
  misc_feature (1)..(18): n is a, c, g, or t
nnnnnnnnnnnnnnnnnnacagtcaaagtttccataaacagaacacatgcacccaggttacagagtatatgttttataaactaaaaatctccaaataaatgtagaaattataaggtattcagtaaagagaattggaaattgcaagtaattttgaaagatacaataaattgtttttcagtgataagaattttttattttttaaggagacagcatgaatactgttccccactaccaagaattggtacagtctaatttcctatatttaggaaaataactggggtcagcacatgcagagatcaatggaataagcatcaccttgaaggttacagaatctccccttccagataagaattaaattttaataaccttctcaatatactatcacaaattatcagttttgaatatgtgactccagcctcttcctctataagtataagcattctagcaattaaaactacatggatatttaccatcacattatatttatgcatgacattttctttttttaattattttttccaacttttttatttgaattagaaacaggattgttttacatgacaatcccaattcccttctcccaccagtcctcccctaaccctaaccctaa

SEQ ID NO: 3355 - DNA, 2469 bp, Cricetulus griseus
  misc_feature (1154)..(1186): n is a, c, g, or t
  misc_feature (2274)..(2294): n is a, c, g, or t
atgatgcttcggtggtctggcatctggggactttctccacctcggatcttcccctccttgctggtggtggttgccttggtgggactgttacctgttctcaggagccatggcctccagcctagccctactgccaacaccatcagaggggctgaaccaccacgggaacgctcaattggggatgtcaccactgctccatcagagcctgtccaccacccagatgaccgcaacttgaccaatttacacattgaacatggcgctaagacacttcgaaaggcctttccagtgctggacattgactacttacatgtgcgcacaccctttgagatctccctctggatcctgctggcctgcctcatgaagataggtttccatgtgatccccaccatctcgagcatcgtcccggagagctgcttgctgatcgtggtggggctgctggtggggggcctgatcaagggtgtcggcgagacgccccccttcctgcagtcagacgtcttcttcctcttcctgctgccgcccatcatcctggatgcgggatacttcctgccgctgcggcagttcacggagaacctgggcaccatcctgatctttgctgtggtgggcacactgtggaacgctttcttcctgggtggcctcctgtacgccgtgtgcctggtgggcggtgaacagatcaacaacattgggctgctggacaccctgctctttggcagcatcatctcggctgtggaccctgtggctgtggtggctgtctttgaggaaatccatatcaacgaactgctacacatccttgtcttcggggagtccctgctcaacgatgctgtcactgtggtcctctatcacctctttgaggagttcgccaactatgactctataggcatctcggacatcttcctcggcttcctgagcttcttcgtagtggccctcggtggggtgtttgtgggtgtggtctacggggtcatcgcagccttcacctcacgattcacctcccacatccgggtcatcgagccgctcttcgtcttcctctacagctacatggcttacctgtcagctgagctcttccacctgtcagggatcatggcgctcatcgcctcaggagtagtgatgcgcccttatgtggaggccaacatctcccacaagtcacacaccaccatcaaatnnnnnnnnnnnnnnnnnnnnnnnnnnnnnnnnnccctcatcttcatcttcctgggcgtctccacggtggccggctcccaccagtggaactggacctttgtcatcagcaccctgctcttctgcctcattgcccgggtactgggtgtgctggtcctgacctggttcatcaacaagttccgcattgtcaagctgacccccaaggaccaattcatcatcgcgtatgggggccttcgaggggccattgccttctccctgggctacctcatggataagaagcacttccccatgtgtgacctgttcctcactgccatcatcactgtcatctttttcacagtctttgtgcagggcatgaccattcggcccctggtagacctgttggctgtgaagaaaaagcaagaaacaaagcgttccatcaacgaggagatccacacgcagttcctggaccaccttctgacaggcatcgaggacatctgtggtcactatggccaccatcactggaaagacaagctcaaccggtttaataagaagtacgtgaagaagtgtctgatagctggcgagcgctccaaagagccccagctcattgccttctaccacaagatggagatgaagcaggcgattgagctggtggaaagtggaggcatgggcaagatcccttctgctgtttcaaccgtctccatgcagaacattcatccaaagtctatggcttcagagcgcatcttgccagcactctccaaggacaaggaggaggagatccgcaaaatcttgaggagcaaccttcagaaaacccggcagcggctgcggtcctataacagacacacgctggtggccgacccctacgaggaagcctggaaccagatgctgctccggaggcagaaggcccggcagctggagcaaaagatgagcaactacctgacggtgccagcccacaagctagactcacccaccatgtctcgggcccgcataggctcagatccactggcctatgagcccaaggcagatttgcctgtcatcaccatcgacccagcctccccacagtcacctgagtctgtggacctggtgaacgaggaattgaaggccaaggtcctaggggtaaaccgggatccaacaaggctgactcggggnnnnnnnnnnnnnnnnnnnnntgaggatggtgtcattatgatgcggaggaaggagccctcatccccaggcaccgatgtcttcacccctgcaccaatgtacagccccagctcccagagaatacagcgctgcctcagtgacccaggcccccacccagagcctggggagggagagcctttcatcccaaagggcgagtag

SEQ ID NO: 3356 - DNA, 207 bp, Cricetulus longicaudatus
cacgcaggctgagatcaatcacttctctaaagctcagaccgctcctaagaagttcgtaaaagaattccgcaattattccatagaaaaagcattgggtgaagtcatcaccgtagacattttggccgaaggcgaaactgttgaagtggtaggcaccaccaagggtaaaggtttccagggtgttgttaagcgccatggattccctggccg

SEQ ID NO: 3357 - DNA, 2744 bp, Cricetulus longicaudatus
  misc_feature (1106)..(1127): n is a, c, g, or t
  misc_feature (2062)..(2080): n is a, c, g, or t
  misc_feature (2359)..(2375): n is a, c, g, or t
attaaagccatttgaggagggaagagtttgttttttagcccatggtttgatggtacagtttatcatggcagrggaagcctggcagcaggaacaagaggtagctgggcacagtgaaccacagtcaagagagatgaatactcagctttcttmtcttcatgtagtccgtacagtggcaccacctacactcaggatgggtcttcccgcctcagttaaaccctttggaaacattcagcggagacacacccaaaggcatgcattgatggtgatcctaaatcctgttaagttgcttttgttttgtattttgttataacaatggaaaaaataacagtcatcaccactttcaccattatcatcaagaccatcatcttctcaccacctgaggatcattagagttgccataggtcctcggtattgatgatagtcacattctgaccttgcctcacttccctagaacccactctggttccctgagacttgctccctgccaagctacaacctcaatacaggcacagaatgaatggttgcaggctgtgccttctgttgcatcctggtgtcacccgaaagaaacaatgacaagaaagtgtgactgcaccgcacttcactggcttcaaattgcatttaatgaaagagaatggcttctgtccaggtttgctgaacagacagctctgcttcctgttactgaaatggcttctctgtctcactcaaagtgtctctctaggtcaaaccgacatgcaggtgaaaaagctgagactgcaggcgtacagctgctgagccagtgatctggactgtccctcctacttccagctctccacttgctgctctccttcacactcccagacaggaaactgtaactgatgctggaacaacataaaatccctcagggacctgctgaccatctgtgagtcacctgcagccacggaggagctttttgtgtcttggcttttaactcaaagtttgtggccaaatatagagaggcagctttcaccttcaatgaaggcatttgggtctcagccagtattgatctgcacttggctccctgtctgccagacaaccttggaatccgttatggatgggctagagcaggattcctggagaagatgctattnnnnnnnnnnnnnnnnnnnnnnctagcagttttttctccctccaagagccagtctccttgtcagtaccagggtgtcttgtcttatggaacctgcttcacagctacctgaggagctgagagtctcgttatatctcagtaacgacaaaggccctcttctcacacttgatttcagaaagcagcaggtgggggaggctaactctgctttagccctcttagcttctttcctgttgctgtgatcagataccctgacaaaagcaacttcagagagaattgattcagcttgaaacttcagattccagtctgtcatgatgaagaagtagcaacagtggggagtctaagagggagctggtcacattacatccagagtcatagcacagacagcaaagaattaatgcagcaaagaattaatgagctactgctcattagtatgctggtgcttggcttgcttcctctacttctacagcctaggattcctgccaagggaatgatgttgcccgtagtgggcgggtcttccaattaactaagtaatcaagagttgttcttcataccgatcgctagtggcctgcttctccagtggttctgcattctgtcaagttggcaagtaaccattgcattccttgtgtgggcatctaacattgctctgttcagtagaaatgcagcgtgagttgtgtggttccaagttttctactagtacattacaaaaagtagtaagaatcaggtgacaatattttgttaaagttttgtatggttttgtatgggtcttttgcctgcttgtatgtctgtgcattgccagtggaggtccaaagacattggatcccatgggctgtaattacagttggtggttgtgagctgctatttggatgcaggatatcaaaactggaacccctgaaggagtaaccagcactcataactactgagccatctctctagcaccaggttgcaatacttgtaatagcnnnnnnnnnnnnnnnnnnntgcacacctttagtcccagcctggaatacaaagtgctttctaggacagccaaggctgtacagagaaactccttgaaaaataaacaaacaaaacaaaacaatacatataatagttaaattgtatcagttatgcccaaaatgtctctcaaaataaataaataaataatttattgttttgtttgagacaggtctctcttcataaccctggctgttctggaactcactgtgaagaccaggctggcttgaactcacacagattgacctgcttttgcctctgccnnnnnnnnnnnnnnnnnaaaagtgtacaccaccactcccagcttctttatattttccagagacggtctcactatgtatccttcgctgtcctggaactcagtatccaggctggcctcaaactcacaagacatctgcctagctctgccatccaagtgttaatattaaaggcgttcaacaccatacttggataatagatttttttaatgagacatttgacattttcctttattattgaccaccaaaatcaccttgattatcatcaccatcactgccattaccaccctcatcatcagcaccaccaccaccaccatcaccattgccattgccattatcatcctggctgtgtttacagctccatctctattggttgaatagccttagataga

SEQ ID NO: 3358 - DNA, 571 bp, Cricetulus longicaudatus
cccatgctgccagagccgactgttccatggatgtagcagctcacaggttttcatttatagttacctgaggacacatggtgtaggcaacagtaaacatgatttaaaatgacaaaaacacttggtccccatagatgtccttgcaacttcattgtaggaccacagttgttgataatatagaggttgccatgtgccatctgcatgggtatcctgtcttcttagtgaaaggttcatcaaacactggaggtgcctatgctggaactttagggctgtgtgtgctgttttctttccatctgtacctgaccccttctcaacatgagacagtcccttgtaacaaaaagtatgtgtcatatgtgcatgtgtttcaaaatagtaccaactgttgtggcagttcctggtggagaggccccagtcctcaggaccgtctctgacccacaccctgggttcttatcacacacaggtcatgttggcagtaaacagaggactccctgccatggctcagattcctaggcccttatttccctcccccggtggagtctgacaacaggagagcagctcacaatcaagaaagctt

SEQ ID NO: 3359 - DNA, 3312 bp, Cricetulus longicaudatus
  misc_feature (763)..(849): n is a, c, g, or t
  misc_feature (2461)..(2501): n is a, c, g, or t
  misc_feature (2658)..(2691): n is a, c, g, or t
  misc_feature (2695)..(2721): n is a, c, g, or t
  misc_feature (3140)..(3201): n is a, c, g, or t
tccacagctgcccatagtgccaagaacaagccaaaggcagaagtgaccatgtccttttcagctgggggacaagtgcatagtgctggtgaagagtagactatatgtctaggcaatctggctcccagccccatggccacactaattgtctcccgggaagtcatggccacccatccactcaggatctacagtgcctcccaacagcctgtccttccctggaccttgtggctcactaggactcaccatggttgctctgtggaaaccttggcatctgatgtagaagactcaacagcattctcctggattctggccttcagggccgagcctggctcccaactacgtgcccgcctcaggcaggactggagctctgagatggtgtcttttgaggggacctacagacacagatgctgttagttctaacagttattcataaccctacccacagcccaccctcagtccagcctccttaccttgtcccgctgctgagctgtggcagaaaggcctggtccttctgaaacagtggtgctctttattttcttgacaggagatgggcttactggggaactagggtcagctggagagctgggatcaactggggaactggggcaggagtcctggtaatcaaaaagctacagatgaatacactagggtggagaggggtgggggggtacctgctctgcaagaagatcactggccttaagagccagaaccaggttgtcagtgaactagaccctaggctgggggggagggggtgcctgtcaattgnnnnnnnnnnnnnnnnnnnnnnnnnnnnnnnnnnnnnnnnnnnnnnnnnnnnnnnnnnnnnnnnnnnnnnnnnnnnnnnnnnnnnnnttttctctccatttcagatgctccagcacaattctttgcggaactatcacccccaacctttgcctgctgcaccctcccagcaaatccaggttcccctctgtagggcagctgttggtctcccctgggggagacagaggagtgcctagccagctccagactctactcctccctcagtcttggcgcccagttccctgcctcagctcccgatggtcagtgttcctctcctagccaggggtcctctggggtcccaagtgcgcctcaccagtccaggccgccgcagcctccgctcgcgggcggccggcctggtcgctcctgggttcggtggagggacgggcacgcttgcgctgcatgctccggatgaactgaggagtcacaagcccactgggcgtcggggtgagacaggccgacttagcccgcggacgagcaaggcccggccgacgcggcggatagaaatcggtaacacgactttgcgccatcgcaaaaagctagttcccgcggatttcgcgcggttttcgcgattccgccttgccccgcccaggctgtaccatcacgcgcagctcttggagggggaaaggtgcatactccagacatgcgcgctagcatgcaccaaatgacgtgcgtcacgtcgggcacctccctgccgccttcagtttgagtgagcgggaatgggactggccatggaatgggtggacaggaatgggctggactcatgaccactggcgtgctgacgtgcggcacagcacatgcgctgtcagtcatttacaagcgctagctaggctgtggagcgtacgggtctcaaatccacgtcgcgcgcacgacgaagtggggcgaccgctagccaatggcttctggcccggcaaagaggcaatcggatgaaagacgcctttgctcctgttgttcacatttgcagaatagcctggtctcgcatgccagcaaagtagctggatcgagtcccaagcagctgctgaatatctggtcccagacgcgcgtagagtctacacagcacggctcaagcaacagaacaggctccaaagcatctcgttgctcttgccacatccgggctatagagtgcagaggtcggctctgggagggggctccagagcaggaagcagcctagaggctgggaaatcaggaaggccacgcagaaggactgatttcctcatcacctgatttcctcagtcactgccacccaacgcttcccgcactctggagggaatggccatgcacatagtactgtcattttgggcaaaggtggctcccaaggaggagggagggctataaggggagggacagcgcggaagcaggacctgggagacctggatagctgtaaggacaagctgcaccgaaggagagttccgaggaggtgggcgcttgtacagttcagagcatcaatctaaaatgcatctgcagctgtggggtgaaggaccaggatttagtagtgagtttccagacttgtgctcgcacctcatgggtgtggtatgccctagagccacacagccggcgtgaggtcttctggatgcttcggagcaaccttagtaaccattccacattagtaaggccacccctggaaagtaggcctttgtatgactcagcattggagcccctcaggaannnnnnnnnnnnnnnnnnnnnnnnnnnnnnnnnnnnnnnnnctggtcacagctgataagagtgatgcatggctgagccaatcagatgttttcctaggactagagaatgctctggggtaggaactacctccaccctgtgtgctagtggcctgtgaaggtaagggcaagcaaacaagtgtaactccagaggactcaagcnnnnnnnnnnnnnnnnnnnnnnnnnnnnnnnnnncccnnnnnnnnnnnnnnnnnnnnnnnnnnngcagagatgaggaatggaacccaaggcattacacacacaagccaatggcaccctaccatctgaactgtgttgcctaactgtgatagttaattttcttcctcagcttgacggggtttcacttcaccatgcctctgggcagtggcatgtccatgaaggatttcctctctcttcctttctttcttatttattttgagtcagggtttctctgtatatgagtactggctgtcctggaacttgctctgtaggccaaacacagagatctgcctgcttcacactctggccaggccctcccccaaactgggaagcaaaacaactccttacattttatcagattttttgtcaaggcctcttccaatccatggaaccttaattaaaacatggtcacaaaaaatcaaagtagcctggcagtggtgcactgnnnnnnnnnnnnnnnnnnnnnnnnnnnnnnnnnnnnnnnnnnnnnnnnnnnnnnnnnnnnnnggcaagttccaggacatcagggctattacacagagaaactgtctaaaaaaaaaaaaagccaagccaaaccaaaccaaaccaacaaacaaaaaagccactccacagaagctt

SEQ ID NO: 3360 - DNA, 770 bp, Cricetulus longicaudatus
tcactgcacacacagtgactggaatcacatccaccaaactccaaatctactacggctcctcagccaactctggcccagttcactctggctctccctgggaggctaacacagctcccttagcaggatggtaggtgccttaggtcctggattacaagtcctgtgtcctatagcattcctgccaggttggaaaacacagccttctgctcagtgacagtcttaatgtttgattgggaaggtacaacctctgcctctatccctcaacatatgggtgacctatttgcttgtaaaaatatgaagccttatcattaattaataaaaaagggggagatgtagggagccgtccctgcattctcctttacaagatgtgcctgcatccggcaggcaccgaatgtaaacaagattattgtgcaggcgctgggtaactttccattccttgatctctgcctattccgtggcgtcatatggtccaatgagctgcagccaatcatggggtgacacgtccgaggcggccgttgccagcctttattaggggacgggattcttggctcggggtctccgcttttgtaagcttatgctctcctctcaagacgcattaaagctttactgcagaaggatccgaatgtcctatgtggttcttgccggcaagacgatcgcgcgggacacatacttgcgccccagacctagctctgctttagcttcttcgttcaaagtaatcaccctgcacaattctcatctgcaggtttccctcacacaatgtgttcctcctccac

SEQ ID NO: 3361 - DNA, 424 bp, Cricetulus longicaudatus
aaagtgatggtgagtcccaattgtcaacttgaggggatttagaaaaaccatggaaacaaacctctaggcctatctgtttctagagagatttaattaagggggggaagatatgccccaaatgtggcaataccttccagcgatgtgaagagctagagtaaataaaagagaagaaagtgagcctagcaccagcatccatcagtctgtgctttctgactgtgcatgccttgtgaccagctacctcatgttcctgacaccttggcttctcttctgggatgggctcccaacagcctgtccttccctggaccttgtggctcactaggactcaccatggttgctctgtggaaaccttggcatctgatgtagaagactcaacagcattctcctggattctggccttcagggccgagcctggctcccaactacg

SEQ ID NO: 3362 - DNA, 424 bp, Cricetulus longicaudatus; identical to SEQ ID NO: 3361

SEQ ID NO: 3363 - DNA, 433 bp, Cricetulus longicaudatus
ggtaccagattaaagcaaagagggggtgctcattcttcagaggccccaagatgttctctggcacacaaccacccagctttgtgagacatctccagctggatactgagaataagactgaacacatcgcagcgtgcggcaagccacttcctgacagcacaggaagacagcctgcagaaagggtcccttcattaagctgataataccccacttatgtggcaatctagcgccaagggctgaggataatttcacaaaaaggaaaaaatttagctgccatggaaacctggacagcaacagatcttctggatgtgacaagattccagacatcgattgcacgaagtctccataaggccagaaagcaccgtggatttaattagttggtgaagcctgtcgcacaggggcagcagaatttgtcctttattctctttccaaatga

SEQ ID NO: 3364 - DNA, 433 bp, Cricetulus longicaudatus; identical to SEQ ID NO: 3363

SEQ ID NO: 3365 - DNA, 3429 bp, Cricetulus longicaudatus
  misc_feature (455)..(472): n is a, c, g, or t
  misc_feature (695)..(700): n is a, c, g, or t
  misc_feature (1818)..(1874): n is a, c, g, or t
  misc_feature (3054)..(3084): n is a, c, g, or t
  misc_feature (3376)..(3406): n is a, c, g, or t
ggatccctgccacgctatggagtgtgcacctgtcactgaaggaagggaccttcagctttgtaaatgagtcagagaaaaatccctgcccagggagtagaaatgctccttgcagtggcctgtgagccataagggtgatgagagtgaggataggcaatagtggcaacatagggcaggatgctgaggtaaaggtttccttctccaggttgaataccatctgtgttgcaaatcaaagacatcaatacttctgactcatagcacaaagttggacactgagaggggttggctctttttcaactaatttgttcataaaaagtgacatcagttttactttctggtttcaatttctcttctgtggggtcagctgccaagaaacaggaagagaaaccagcagccactgttatatatgggtcagtagcacttcattagaagtctgaggacgagattgcctggagcgnnnnnnnnnnnnnnnnnngcccttcaacactgctgggagttgcacagcaaccatgaggtatgtcttcccttgctctggtggtgaggaggtcagccctgctgatggctgcaaatcctaagcagccacagtcccacgagaggctagttgtgtttctgtgtttgtttattgccttgcccacctctgtccctatagctgtaagtatgtcatagagatagatgctcagttgcttcctccagatctnnnnnnccttggtgaggtttagattaagactgttaagaaggatgagaatatttgctgtgatcctactccttgccaggtgaatgtgggatgtccccaaatgactgtttctttatttttttctgtcccacagcacaaccactaagaaatccttggagagcaagctacagcagctaaaatgccatttcacctggaacttgatggcaggagacgagtcattggatgagtttgaggacaaggtgtttaacaaggatgagtttcagaaacgtgagtgtaaagccacaatgtgcaacatattggcgtttgtaaagcaccgcagaggccaaaatgcatcagcactgaaagagttagagaaagctgaacagttcatccagcaacagcatcctgaccacgtagaaatcagaaatatagtcacctggggaaactatgcttgggtttactatcacatgggccaactcgaaaaagctcaggcttatcttgacaaggtgagacaggtctgtgagaagttttccagtccctacaggattgagagtcctgagctggactgtgaggaagggtgggcccgactgaagtgtacccgaaaccaaaatgagagagtgaaggtatgttttgaaaaggctctggaaaaggacccgaagaacccagaattcaccagcggctgggccatctcaaactaccgtctagacttctggccagcacagcagaatgccgtcgactctctgaagcaagccattagaatgtctcccaacagcccttatgttaaagtactcttggccctgaaacttgagatgaatcaggaaaaccagggaaaggaactggttgaagaagccttgagggaagccccaggtgagacagatgtactccgcagtgcagccaggttttattataagacacatgataaagacagagctatacagttgcttagccaggctttagaactcctacccaacaatgcctatgtgtattactatattgggtgtttctataggtcaaaagtccttcaaatagattccagaagagaaacttcacagaatgagaatagagagcagttactgaaacaagcaatttattacttaaagaaagcagaagagaccaaggagatgatcaaagattcctgtagctacctnnnnnnnnnnnnnnnnnnnnnnnnnnnnnnnnnnnnnnnnnnnnnnnnnnnnnnnnnaggattcaagaaggaactcactcctggccttaaacagttgctccacctacggtatggcaattttcagttttttcaaatgaagtgtgaagacaaggccatccaccagtatcttgagggtgtgaaaataaggcagaagacgaagcctaaagaaaagatgacaaacaaacttagattcattgctgaaaggagacgttctcaaaatggatttgactccaaggccttgcacatcttggcgtttcttcaggagttgaataaagaaagccagcaagcggccaaagtctctgaaaggggacaggactctgagaggcctgttttttcaccgtctttgcatgaggggggaaatgaacagtagtaaactggtgcccacaaggctactgctggaaggaaagtagaaacccttaccaagtagccattcagaatacttaacaactacatggaataagcatgtcctaacaggctgactgtagtatttatcagggttgctgggaaccctgtgatcagatgttggcacctaaatctctggatcatgtaggggtctcagaaagaggccagttggaggcacagacacagaggcctggcaaacagtctagatctctttctatttcttagagatagtttccatggtagcaaattttcaaaccccctctgtggatttgtcttgggtttgtttctgtatttatgtaaagcagtcaaattcctcctatgggtgagtttccatccttgagttattgctgatatgcacagccttgttctacataataacagtgtccatcaaaaaactgagcagtggctcagacaataatcccagcacttggcaggaggtgagacaggaggattacagtgagttggaggtcagcctgagcatgacctggaaaggggtgaagggtgttgagaattagacatgtaaatattaaatgattatgtacgttgcttgttagtttggatatgtatatgcctttataaccactatcatcatatgtttataaaacccagaaggtagtgattttgttttactgcataattttgaaatttacaaaatagtgctcaatattaattgagctcaaaatagaaactcaatagtgagttccaggtctaaaaacaaacaaaccataacaaaagctgagggaccaaatcaatcctccctccaattgcccagccagtcctcaatctaccgtgtccnnnnnnnnnnnnnnnnnnnnnnnnnnnnnnncagatggcaatataactggaaaaactgagaccagaggaagttagaaggcaggccatatgtgtgcaaagcaggaagtcaatgccaaacttccaagatgctctcggagggactgcttcctgactctgctctatttgtgagtatgatgctgcatgccccttttctgcctcaatcccagaaaacacaaagccaacaaatcatttctgaaacctctgaaacaaccaaccagaataaagctccctgttcttattatttctctctggtatttgtcacagcaagtgaaaactgttggggnnnnnnnnnnnnnnnnnnnnnnnnnnnnnnntctgctgttcagggacgtcctct

SEQ ID NO: 3366 - DNA, 1050 bp, Mesocricetus auratus
cgcaaaggcgcagccggctcagaagcgtcgagggagctgaggcgtcgacctccgtcccgggccgctgaagaaactctaaagatggtgcctggtggaagaaagcactctgggaaatctgggaagccaccactggtggatcaggctaaaacagcctttgactttgagaaagaagataaagaactgagtggttcagaggaggatgttgctgatgaaaagactccagtaattgataaacatggaaagaaaagatctgggggactagttgaagatgtgggaggtgaagtacagaatatgctggaaaaatttggagctgacattaacaaagctcttcttgccaagagaaaaagaattgaaatgtataccaaagcttctttcaaagccagtaaccagaaaattgagcaaatttggaaaacacaacaagaagaaatacagaagcttaacagtgaatattctcagcaatttatgagtgtgttgcagcagtgggaactggatatgcagaaatttgaggaacaaggagaaaaactaactaatctttttcgacaacaacagaagatttttcagcagtctagaattgttcagagccagagactgaaagcaatcaaacagctacatgagcagttcataaagaatttggaggatgtggagaaaaataatgataatctatttactggcacacaaagtgaacttaaaaaagaaatggcaatgttgcaaaaaaaagttatgatggaaactcagcagcaagagatggcaaatgttcgaaagtctcttcaatccatgttattctgatgagtctttgaagaaagaacttgaacctatgtaatatatgatacagttaaaacattatctatgaggcatgcctatagaaagtatactttgaactataacattcataaccatagcttgtttaagtggaagacttctgttcctgttaacttttaaataaaacttaacagctgtataagtagcagctatttcagtgtatcaagctttcaactcttataatagtgaattgtttgctactattgtgtcaataaaaatgatttaaattta

SEQ ID NO: 3367 - DNA, 978 bp, Cricetulus longicaudatus
  misc_feature (359)..(382): n is a, c, g, or t
ggccgcgaacactggccagaattttcatgttaaacatttaacattggagattcagtcttcagaccaaagagttacggaaaatggcagacggtttttcgcttaatgatgccttagctggctctggaaacccaaaccctcaaggatggcctggtgcatgggggaaccaacctggggcagggggctacccaggggcttcctatcctggggcctaccccggacaggctcctccaggggcttatcctgggcaggctcctcctggtgcctaccctggcccaactgcccctggagcttaccctggacctgccccaggagcttacccagggcaacctggagcatctggggcctaccccagtgctccnnnnnnnnnnnnnnnnnnnnnnnnctatggcgcccctaccggagcattgacagtgccctataagctgcccttggctggaggagtcatgcctcgaatgctgatcacaatcatgggcacagtgaagcccaatgcaaacaggattattctaaatttcttgagagggaacgacatagccttccactttaaccctcgcttcaatgaaaacaacaggagagtcattgtgtgcaacaccaaacaggataataactggggaagagaagaaaggcaatcagctttcccattcgaaagtggcagaccgttcaaaatacaagtcctggttgaagctgaccatttcaaggttgcagtcaacgatgctcacttgctgcagtacaaccatcggatgaaaaacctcagggaaatcaaccagatggaaatttctggtgatataacccttaccagtgctgcacccaccatgatctaacccggaagggcagcgcttgaaactgaagttcaatggtactcatttaaaggctccgtgctcattcggagtggaaaactacatgtattccatcttacccttcttgtaaggcatgcacttaataaatatgcccgtgctgacgggtacctggttgttttgcggc

SEQ ID NO: 3368 - DNA, 536 bp, Cricetulus griseus
cccaagtgaaagaagtagctcctggcaagtcttccttcgttgcttggcaggatggaaggtcgcagcagtgtgggaaaaatcagggtggcccgggaatcccgcgccaaagagccttttgaaaaggcaatgcagaagagaaggcccttttgagagactttcagccaaagaagacccttccccaagcttccgggccagggagcaactagccagggcaatcgggctgcctgagtcccgcgtgcgtgtggtttcagaattgccgaactcgtttggggatggtgaggcaaggcccagaatcctcagggaaccgaagcgtcctggagtccccgcagccgcctgaaatgtctgatgccagggcacaaggtagaaggacttatctgtgatcatttcagtatttctacacaccattgctcagaccctgcagccagccacgccagtctggtttagtcatgttcctgatctgagagtgaccaagcagatgcttgcaaagcctccgttttagctgtgccggtagaagagagattcagtgtatgggtggg

SEQ ID NO: 3369 - DNA, 1164 bp, Cricetulus griseus
  misc_feature (212)..(238): n is a, c, g, or t
  misc_feature (1145)..(1159): n is a, c, g, or t
ggatccacttgactggaaaatcttttctcaacatttagttcttaggcaccaactgtctttgaagatgaagtgtatttctagtatgcagcagaaggatggattctgttttctcattcattccacttacctgtgtctttttatatgtgagttaagtagattaatattgagagatacaagaacgattggttgatcattcttctttgttttggatnnnnnnnnnnnnnnnnnnnnnnnnnnnaaatggtgtgtggatttccacccagtattcttttggctgttggtaaagtgggattatctattgcctgtttttctggttgtagtcaatttccttgggtatgagttatacttccaacactttctgtatggcttgattggtggatatgtgttgtaaattttttgtgagttcaaggtagggaacaagattgtttcacatgtaagtccattctccctctccctccccctaactccatcccacctcgaatgatgcagtggaccacagctagactgagagtacacaggacagcttgatgacactggctgctgcagtgtccaagagagcaggcaggggagtgggcggggcctccacccagcgggtagataaaaggccagggtgtagcacgctgaggcccagacaagcaaaggacttgcttgctctttcctcctggggcggaggtctgttttggtagtggcaagtgaaagaagtagctcctggcaagtcttccttcgttgcttggcaggatggaaggtcgcagccgtgtgggaaaaatcagggtggcccgggaatcccggcgcccaaagacccttttgaaaggcatgcagaaggaggcccttctaagtcgtttcgccaagagcccttccccaagcttccgggccagggagcaactagccagggaaatcgggctgcctgagtcccgagtgcgggtgtggtttcagaaccgccgaagtcgttcggggatggtgaggcgaggcccagaatcctcagcgagccgaagcgtcctggagtccccgaagccgcctgaaatgtctgatgccagggcacaaggtagaaggagcagcccgtcgggacgtaggaggcctcgcactcgactcagctcgacacagttggccatcctgctccaggcttttgagaggacgtacccgggcannnnnnnnnnnnnnnagctc

SEQ ID NO: 3370 - DNA, 1005 bp, Cricetus cricetus
atccaggcgccgacccaggccagagcagccgtcctcggtgccgattcctggaggcctctcggctagagcggcccgtcagctcgcctgctcccggctagagcgtcgcttccgcgtagagccgcgtgtgaccttcccgcctgcgagctatgctgccggcagcggcggcggcggcgagcctgtgggcgccgcggcttgggctgcggggcgcacggctccgcctcgccaggcaacaggtccccggtgtctgtgcagcgcggcagttgagcagcagcagccagcgaaggagtgaagctctcgccggtgcccctctggataatgctcccaaggaatatccccccaagatccagcagctggtccaagacattgccagcctcacgctcctggagatttcagacctcaacgaactcctgaagaaaacattgaagatccaggatgtcggccttatgcctatgggtggcatgatgcctggtgcagtccctgctgcagcagcagcagcccctgaggtggctgagggagaagacatccttaaacagaaagagcggacacacttcactgttcgcctaacagaagcaaaacctgtggacaaagtgaaactgatcaaagagatcaagaactatgtccagggcataaaccttgtgcaggccaagaagctagtggagtccctgccccaggaaatcaaagcaaacgtcgccaaagccgaggcggaaaagatcaaagcagccttggaagcagtgggtggcactgtagttctggagtgacactctctttctgaggactttcggactggggtccctgggacctgggcaaaggcctgctcacccctgcttcactcccaggtggcttgttgggagcaacagctgctgacacttggtgaccgaattctcctgggagagggacaggatggacctactgtgatggggaggggcagtttacagcctgtgcagactctcaagagattgccttgagatgctataaagtgaacagccctggaggcgactaagagag

SEQ ID NO: 3371 - DNA, 964 bp, Mesocricetus auratus
  misc_feature (928)..(947): n is a, c, g, or t
aaatccaacatgaaaatcctcgtggccgttgcggtcttttttctcgtttccactcaactgtctgcagaggaaatcggtgccaacgatgatctaaactattggtccgactggtctgacagtgaccagatcaaggaggcgctgccagagccctttgagcatattctgcagagaatcgcccggagacccaagcctcagcagttctttggattaatgggcaaacgggatgctgattcctcaattgaaaaacaagtggccctgttaaaggctctttatggacatggccagatctctcacaaaaggcataaaacagattcctttgttggactaatgggaaaaagagctttaaattctgtcgctttcgaaagaagtgcaatgcagaactatgaaagaagacgtaaataaactccatagcacactattattcagcttcatttgtgtcaatgagtggtgaaaggtaaaataaaatgcactatgaggaatgattatttatttaataacaaatgttgttatgagtggcggaactcaaaaaagtgtttattttttcatattgtgccaataagaggttgtaattctaaatatggggacctcctcaggaagtaggagttaggtagtaattcccagcaaaagcacggtgtcgatggtattgcacaagcttgccaaggatgcagtcgccaaagaaagacatggccactcagagccagttcagacagctgctgccatgagcgcaggaactcctgtgtgctcttgtgcttttaggctgacagtgtagaaactttggcatctgactctattggtatcctagcagcatgtttcatgttttgtgactatatagagatgtttttaaaagtttcaatgtgactccctggtcttcattcattgtatgatgtgttgtgatagctaccattgtaaataaaagaatctatcttcnnnnnnnnnnnnnnnnnnnngagctctagaattcagg

SEQ ID NO: 3372 - DNA, 919 bp, Mesocricetus auratus
  misc_feature (883)..(902): n is a, c, g, or t
aaatccaacatgaaaatcctcgtggccgttgcggtcttttttctcgtttccactcaactgtctgcagaggaaatcggtgccaacgatgatctaaactattggtccgactggtctgacagtgaccagatcaaggaggcgctgccagagccctttgagcatattctgcagagaatcgcccggagacccaagcctcagcagttctttggattaatgggcaaacgggatgctggacatggccagatctctcacaaaaggcataaaacagattcctttgttggactaatgggaaaaagagctttaaattctgtcgctttcgaaagaagtgcaatgcagaactatgaaagaagacgtaaataaactccatagcacactattattcagcttcatttgtgtcaatgagtggtgaaaggtaaaataaaatgcactatgaggaatgattatttatttaataacaaatgttgttatgagtggcggaactcaaaaaagtgtttattttttcatattgtgccaataagaggttgtaattctaaatatggggacctcctcaggaagtaggagttaggtagtaattcccagcaaaagcacggtgtcgatggtattgcacaagcttgccaaggatgcagtcgccaaagaaagacatggccactcagagccagttcagacagctgctgccatgagcgcaggaactcctgtgtgctcttgtgcttttaggctgacagtgtagaaactttggcatctgactctattggtatcctagcagcatgtttcatgttttgtgactatatagagatgtttttaaaagtttcaatgtgactccctggtcttcattcattgtatgatgtgttgtgatagctaccattgtaaataaaagaatctatcttcnnnnnnnnnnnnnnnnnnnngagctctagaattcagg

SEQ ID NO: 3373 - DNA, 1744 bp, Mesocricetus auratus
ctgcagctgcaggctgttgcatggctcccatggaccctgagcgctgcgcgccttttgccgtgggcccggcagccggtccctatgcggccgcgggggacgagcctccaggcccccaggggacttccgacgcttcgcctcacctgcaccccgcgccaccccgcggcccgcggctgagtcgcttcccggcctgcgggcccctggaaccctacctcccagagcccgccaagccgcccgccaagtacctgcaggacctcgggcccgccccggtactcaacggcggccacttctacgagggccccgcagaagctgaggagaaggcctccaaagctgccagtttcccccagctgccggtggattgccgagggggtcccagagacggaccctctaatgtgcaaggctccccaggcccctgcctggccagcttgcgagtccctctttcccctggacttcctgacaccatggagttggccaagagcaagagcaagaagcgtcggaaccgcacaaccttcagcacattccagctggaagagctggagaaagtcttccagaaaacccactacccggacgtgtatgcccgagagcagctggctttacgcacggacctgacagaggcccgggtacaggtctggttccagaaccgcagagccaagtggcggaagcgtgagcgttatgggaagatgcaggaggggcggaaccctttcactactgcctatgacatctctgtgctgccccgaactgacagccatcctcagctgcagaactctctgtggcccggttcagggtctgggagcccaggggggccctgcctcatgtctccagagggtatcccctctccatgcatgtctccatactcccactcccatggaaacgtggctggcttcatgggagtgccagcctcccccgcagcccaccctggcatctattccatccatggctttcctcctgccctgggagggcacagctttgagccttctccagatggtgactacaagtccccaagcctcgtctcgctcagggtaaagcccaaagagccccccagcctgctgaactggaccacgtgatgggttacggggacacagaacgagctgctcactcctcttcctgctctcccctgctcctcgccccatctctgcctggacaccggacagaaaccctctgctccatgtctgggtgggtcccagaagcttgggagagaagcttcagggatcaggctacagggtcttaagctctaaaaaggtgggaccccctgagagactcaagcatgtaggacactttctgtaaactgggtcccctcgttcaaattgggctagagacactgcctgttttctcaaagactatttctaagtctggggagccagcccaggaagacgggaggagaatgcagactgagcagggaggagctctctctctgtggcactcagggctggcctcgcttctgcctttctaccaccagggggcgtttgctaagtgcccggagctgacacgtgcccagaggacaaaggtcagcttaataaaaggcgggggtttcctctgctccaagcatccctcaaatctttctgccccgtacccagtctatcaatatactgtggagtcattttctccaaggacggaaaagattccaccaatcattaaatatttggatttgctttcatgggatcaggccagggctatgccatggaaaccatattggatgttgatcaaaataaaacagatttttctagtctctgaaaaaaaaaaggaattc

SEQ ID NO: 3374 - DNA, 2130 bp, Mesocricetus auratus
  misc_feature (784)..(808): n is a, c, g, or t
  misc_feature (961)..(992): n is a, c, g, or t
gaaagaaggaagagagggaggaggcaggacagagggagggactgcccgggaggcaggagcgccgcaaggagccagcggaggaccgtgggtcgaggtgcagctagccacccgcagctccccgcgccccctcatccctagccctctgcgcccctggcagcctccagcgttcgtccccaggcagcatggtgaggtctgttctgggtccctcgccaccatgtacgtgagctacctcctagacaaggacgtgagcatgtaccccagctccgtgcgccactccggcggcctcaacctagcgccgcagaactttgtcagccccccgcagtacccggactacggtggttaccacgtggcggccgcggctgctgctgcggcgaacttggacagcgctcagtcgccagggccatcctggtccaccgcttacggagcccctctccgcgaggactggaacggctacccgcctgggggcgctgccgcagccaacgctgtagcccacggcctcaacgggggctcaccggccgccgctatgggctacagcagccccgccgactaccacgctcaccatcacccgcatcaccacccgcaccatccggccgccgcgccgtcctgcgcctccggcttgctgcagacgctcaaccccggccctccgggacccgcagccaccggcgccgccgaacagctgtctcccagcggccagcggcgaaacctgtgcgagtggatgcggaagcccgcgcagccgtccctgggaagccaagtgaaaaccaggacgaaagacaaataccgggtnnnnnnnnnnnnnnnnnnnnnnnnngagctggagaaggagtttcactatagtcgatacatcaccatcaggcggaaagctgaattagctgccacactggggctctctgagaggcaggttaaaatttggtttcagaaccgcagagccaaggaaaggaaaatcaacaagaagaaattgcannnnnnnnnnnnnnnnnnnnnnnnnnnnnnnntggcatcacctccaccacagccctcgcagcctcagccagggtcgctgaggagcgtgcccgagcccttgagtcccgtgtcatcactgcaaggctcggtgcctggttctgtccctggggtcctggggccagctggaggggtgttaaaccccactgttacccagtgacccctcccatggtctgtagcggcggcagagcaattccaggctaagccatgaggagcatgggcgctgctagagtcctcagaagagacccctctcctgccacccacaaacaatacctacagatgaagaatggggacggaagtaaagacaagtgggactgtgggcctcaggggaagatatggtccagttttttattttttccattctgactcttccggccagtgatgacaaaggaagtgatctctgggccttcgttcatgctccctgccaggactggctacaagctttcagcctcttctgccccggctcttagcttcccatatggactgtgtatctggttggagggagtgaggctgggagaatgagcaatacttgagccgagatggctgtttcctactgactgctctctgagaaccagctggacgtcctgcctcaggggcagggacagttcaaactgcaggagccagaggcagctgcatcgcaggctgggctgatcaaagtctgcagagcccccaggtggtctgtgtttttcttctccctttacagacctggaagggttggtgggttcagggactgcggccagaggagggggtggtcaccaactccaggccctgcgacaagggcttgtttggaaagcctgtcaccagagctgctgtaggctgaatgtatgtctgtgttgtaaatgccagagccaacctggacttccggttctttccctagtctctggctggtgaagaacggagctgttgctgctgttggagtcattgatctgtgtaaccagctaagcaagcctttaaaaagccatgggtagacaggtgatacggtgtagggaagtaggggtatccgaacacagtcgacttttattttctaagaagacaagataaaccaactttacagatttcagatcctggcatttatcttctttggattttgacaaattattttttttcaggaaataaaatatgttctctgattgt

SEQ ID NO: 3375 - DNA, 264 bp, Mesocricetus auratus
ggatcctgcagtgtggcccgcgcggctcatctcgcagctttcctaggcttaacgaaagcacttccctgtcccaggtcccgaaaaccaaagaagaagaacccgaacaaagaggacaagaggccccggacggccttcaccgctgagcagctgcagaggctcaaggccgagtttcagaccaacaggtacctgacagagcagaggcgccaaagcctggcccaggagctcagcctcaacgagtctcagatcaagatatggttccaaaac

SEQ ID NO: 3376 - DNA, 1277 bp, Mesocricetus auratus
gacactccttctgtcctttcccaggagtttggcaactgagggagcagagtcccagaaggcactgaagctagacgcatctctttcccggctctacaggtcttccaggttcatctcgaacatgttggacggcctgaagatggaggagaactttcaaagtgcgattgagacttcggcctccttctcttccttgctgggcagagctgtgagtcccaagtctgtctgcgaaggctgtcagcgggtcatctcggacaggtttctgcttcggctcaacgacagcttctggcatgagcaatgcgtgcagtgcgcttcctgcaaagagcccctggagaccacctgcttctaccgggacaagaagctttactgcaagtaccactatgagaaactgtttgctgtcaaatgtgggggctgcttcgaagccattgcccccaacgagtttgtcatgcgcgcccagaagagcgtgtaccacctgagctgcttttgctgctgtgtctgtgagcgacagctgcagaagggggatgagtttgtcctgaaggagggccagctgctctgcaaaggggactatgagaaggagcgggagctgctgagcctggtgagcccagcagcctcagactcaggcaaaagtgatgatgaagagagtctttgcaagtcagcccatggggcagggaaaggaacgtcagaggatggcaaggaccacaagcgacccaaacgtcccagaactatcttgacaacccagcagaggagagcattcaaggcctcatttgaagtatcctccaagccctgcagaaaggtgagggagactctggctgcagagacaggactgagcgtccgtgtggttcaggtgtggttccagaaccagagagccaagatgaagaagctggcgcggcggcagcagcaacagcaacaggatcagcagaacacacagcggctgagctctgctcagacaaatggtggtgggactgctggaatggaagggatcatgaacccctacacagctatgccaaccccacagcagctgctggccatcgaacagagcgtctacaatgctgaccccttccgacagggtctcactccaccccagatgcctggagatcacatgcacccctatggtgctgaacctcttttccacgacctggatagtgatgacacttctctcagtaacctgggcgactgcttcctagcgacatcagaagcggggcccctgcagtccagagtgggaaaccccattgaccatctgtactccatgcagaattcctatttcacctcttgagtcttctaga

SEQ ID NO: 3377 - DNA, 1302 bp, Mesocricetus auratus
  misc_feature (847)..(873): n is a, c, g, or t
aaccaaagaccatggtgcactgtgcgggctgcaaaaggcccatcctggaccgtttcctcttgaacgtgctggacagggcctggcatgtcaagtgcgtccagtgctgtgaatgtaaatgcaatctgaccgagaagtgcttctcccgggaaggcaagctctactgtaaaaacgacttcttccgatgtttcggtaccaaatgcgcaggctgtgcgcagggcatctctccaagcgatctggttcggagagcacgaagcaaggtgtttcatctcaactgcttcacctgcatgatgtgtaacaagcagctctccaccggagaggagctctatatcatcgatgagaacaagttcgtttgcaaagaggattacctgagtaacagcagtgtcgccaaagagaacagcctccattctgccaccacaggcagtgaccctagtttatcgcccgattcccaagacccatcgcaggatgatgccaaggactctgaaagtgccaacgtgtcagacaaggaaggcggaagcaatgaaaatgatgaccagaacctaggtgccaagcgcaggggaccccgaaccacgatcaaagccaagcagctggagacattgaaggcagcctttgcagctacacccaagcccacgcgacacatccgtgagcaactggcccaggagactggcctcaacatgcgtgtaatccaggtctggttccagaatcgacgttccaaggagcgaaggatgaagcagctaagcgccctgggcgcgcggcgccacgcctttttccgcagtcctcgccggatgcgaccgctggtggaccgcctggagccaggcgagctcattcccaacggccccttctccttttnnnnnnnnnnnnnnnnnnnnnnnnnnngtcccgggggcaactacgacttctttccgcaaggaccaccgtcctcgcaggcccagacaccagtggacctacccttcgtgccatcatctgggccttcagggacgccgctgggaggtctggaccacccgctgcctggccaccacccttccagcgaggcgcagcgattcaccgacatcttggcacatcccccaggggactcgcctagtcctgaacccagtctgcccgggcctctccactccatgtcagcggaggtcttcgggcccagtccacccttctcatctctgtcggtcaatggcggggccagctacgggaaccacctgtcccatcctcctgaaatgaacgaggcagccgtgtggtagcgggccttgcgtgggccacgggagctcgtggttgtacagagacgagcttttatttaaaaaaaaggaattc

SEQ ID NO: 3378 - DNA, 892 bp, Mesocricetus auratus
ggcataaattgcggggtccggaaccatgtcgctgaccaacacaaagacggggttttcagtcaaggacatcttggaccttccggacaccaacgatgaggaaggctctgtggccgaagggccggaggaggaaagcgaagggccagagcccgccaagagggccgggccgctggggcagggcgccctggacgctgtgcatagcctgccccttaagagccctttctacgacagcagcgacaacccctacactcgctggctagccagcaccgagggcctccagtactccctgcacgggctggcggccagcgctcccccacaagactccagctccaagtccccagagccctcggctgacgagtcaccggacaatgacaaggagaccccgggcggcgggggggacgcaggcaagaagcgaaagcgccgagtgctcttctccaaagcgcagacctacgagctggagcggcgcttccggcagcagaggtacctgtcggctccggagcgcgagcacctggccagcctcatccgcctcactcctacgcaggtcaagatctggttccagaaccatcgctacaagatgaagcgtgcccgggccgagaaaggtatggaggtgacacccctgccctcgccgcgctgtgtggccgtgccggtgttggtcagggacggcaaaccgtgccacgcgctcaaagcccaggacctggcagccgccactttccaggcaggcatccccttttccgcctacagcgcgcagtcgctccagcacatgcagtacaacgcccagtacagctcggccagcaccccccagtacccgacagcacaccccctggtccaggcccagcagtggacttggtgatcgccacctctccaagactcgaggccgtaggccctggccccaccc

SEQ ID NO: 3379 - DNA, 576 bp, Mesocricetus auratus
cagaaaacggagtcaaagcaagccgggaggagaaggcagagagcgcgagttcctcggtctcagagcccagtgcaagcgcttccaccgccagcagagtgcattccagtcctgccggcacagtcgtgacgccctctgctgttctccccgggctagcacaggtgatctccgccgtgtctgcccagcagagctccaacctggtccccaaagtcttaatcccggtcaacagcattcctgcctacaacgctgcattggataacaacccgcttctactcaacacctacaacaaattcccttatcccacactgtccgagattacagttctttctgctcaagcaaagtacacagaggaacagatcaagatctggttttcagcccagcgtctaaagcacggcgtgagttggaccccggaagaagtagaggaggcaaggaggaagcaattcaatgggacagtgcacactgtacctcagaccataactgttattcctacacacatctccacgggcagtaacgggctaccttctatcttacagacgtgccagatagttggccagccaggcctgggtcttactcaagtag

SEQ ID NO: 3380 - DNA, 1168 bp, Cricetulus longicaudatus
ctgggcatcaatgggaaggtgctgcggatcttcgacaagagaacccagcaaaaattcgccctgaagatgctccaggactgtccgaaggcacgcagagaggtggagctgcactggagggcctcccagtgcccacacattgtggacattgtggatgtctatgagaacctgtatgctgggaggaagtgcctgctgattgtcatggagtgtctcgatggtggagagctctttagtcgaatccaggaccgaggagaccaggcattcacagaaagagaagcgtcagaaatcatgaagagcattggtgaggccatccagtatttgcactcaatcaacattgctcatcgggatgtcaagcctgagaacctcttatatacttccaaaaggcccaatgccattctgaaactcactgattttggctttgccaaggaaaccaccagtcacaactctctgaccactccgtgttatacaccatactacgtagctccggaagtgctgggtccagagaagtatgacaaatcctgtgacatgtggtccttgggtgtcatcatgtatattctgctatgtgggtatccccccttctattccaatcatggccttgccatctctccgggtatgaagacacgtatccgaatgggacagtatgaatttcctaacccagaatggtcagaagtatcagaagaagtgaagatgcttatccggaatctgctgaaaacagagcccacccagaggatgaccatcacagaattcatgaaccacccctggatcatgcaatctacgaaggtccctcagactccactgcacaccagccgtgtcctgaaggaggacaaggaacggtgggaggatgtcaaggaggagatgaccagtgccttggccacgatgcgtgttgactatgagcagatcaagataaagaagatagaagacgcatccaaccctctgcttctgaagaggcggaagaaagctcgtgccgtggaggccgcagcccttgcccactgagccgctgtgtttcccaccccactggaggacaagcaataactctacatgaatatattttttaaacaaagagacacaagctgcccactgctgcctcctgtcctcctgggctatgtggagcccagatatcctctggctgattctgcccttggctctgacctccctggagaggagggttggg

SEQ ID NO: 3381 - DNA, 2267 bp, Mesocricetus auratus
  misc_feature (129)..(146): n is a, c, g, or t
  misc_feature (382)..(397): n is a, c, g, or t
  misc_feature (399)..(415): n is a, c, g, or t
  misc_feature (808)..(826): n is a, c, g, or t
  misc_feature (828)..(844): n is a, c, g, or t
  misc_feature (914)..(946): n is a, c, g, or t
  misc_feature (1635)..(1649): n is a, c, g, or t
atataggcgcatgaagtaatggttactgttttagtaattctgtagctacaatcaggacgtaaggccaatttagcaaaagctttaatagcacactccatatcctcccatggctcagcctccaaaacaatnnnnnnnnnnnnnnnnnngtaaaaccaaaaataaataaataaacaaataaataaataaccccccccaaaaaaaaaccaacagtcccggctgtccccaaactcattctgtagaccaggctggccttgaactcacagatctgccatcttgcctgcctctgctggcattaaaggtgtgcgccaccaccaccaggtggagaccctgtctgtaagagaaaaagggggctagtttcaggacagtcagagcttgttacatnnnnnnnnnnnnnnnngnnnnnnnnnnnnnnnnncggggatggggagggtaagggaataaacggaagtagggatagaatactagattcatgtaaaaaccaaaaatctaggaacgcaagccaaatgtaggagcacagcgccagtgaggtggagaccaggagatccaggagctccacactcctacatgacaaggtgtaggcaccaaggccgtcacacagcttgcaggcacctggacaggttggggagcagtgtctcttccgggcagctcagctagtctgagtgtctcttcagctgcagcactgataatatatccttggggagggagggaggaaggacccgtgttgtctggtcagtttcagagtctaggggtttcctagcctccctagtaggccaggtgatggtggtgcacacctttaatcccaacactnnnnnnnnnnnnnnnnnnnannnnnnnnnnnnnnnnnaccaacctggactatagttccaggatacaggacagcctcccctcccaatccacagagaaacccttcctcnnnnnnnnnnnnnnnnnnnnnnnnnnnnnnnnntgtacctgtattgtcttgacactatggtactatttaccaacatgtgagatgggggtgttgggatgcagacaatgaaaaatgacaagtcattcttcattatcctaaaatgataaatctgtaacctcgggccaagtaagggaaatacaaggatgaaatttgtagttcatccctacaaacatgatgatgtaactgctcttccatgacagtcttccagggctagtaccaatactgtgaggcataaggacggtgaagatcttttcagatgctagcaaatgtgttcataagctagaggataatcagtgagtcttcgtgaagcaaagcaaacctttagcaattcctgctatttgtaactcatattgccactgccacccaaatccaaagacagggcagtataatactaaaatctctaagtctgcttttcatatttagttacttttttgggacacagagagaggccagagctagcatacttcccaacagaaggcaagctgcagtgcttgtactccactgttgcataaatgggctcttggagacttaacagaaattgggtttagtactgtgttagatgaccctatagggacataggaagaactaaaatttcagcgaggtgtgcttataattaagactaaccaagctgtttctccttgtccctttttgtaagctcagtacctatacatggaagggaactnnnnnnnnnnnnnnngagtatatttcaaatgactatggtagtactgagaaacaggccttgcatgtgtaaagaacaagtaagaggaaaagaaagccttaatgatagatcgttcaagaaggttcacagaaaacgcccaaccttaggcctttaatatactttgttaccttgttaaagaagatttcattgctaccacaatcaaagagaacatggaatgcctcatctctggaaagtagatgtgacaacagattggagaatctatcatctaaagctgaagcgtttacaatcccttacagctaacgggctaccccctgagagtactgtcatacaaggtagcgccactgtctaagagatggaaatgtcacacaactgaagatgtaccagtgactgttctttgtggattttcaaatgcctctagaccagtggttctcaaccttcctaatgctgtgaccttttagtacagttcctcatttcgtgatgacttccaaccatagttattttcgttgccacttcacaaatgcaactttgactgttatgaatgtaaacatctgtgttttccgatggtcttaggcaacgactcctgtgaaagggtcatttgaccccttggaacctactggttgagagccactgctctag

SEQ ID NO: 3382 - DNA, 5376 bp, Mesocricetus auratus
  misc_feature (911)..(939): n is a, c, g, or t
  misc_feature (1555)..(1608): n is a, c, g, or t
  misc_feature (2547)..(2564): n is a, c, g, or t
  misc_feature (3949)..(3991): n is a, c, g, or t
cacttcctcatccgcccaaacttacaagcacgccaaagccacacctccacccaatcaaattacacactacgcccacttcattttaatattggcactagtccagtataaggtatattattagatatttacacacaggaaacgatgcatatttatgcccaaacttttacacaaatgttgatagcagatatttttcccgagtggaaacagcccaatgtcagtacatcaactgaagaacagacagggaaaatgtggtatgtctgtaagatgtattacctggcttctcagactctggcttgtgagaacccagctggttgttttgctctttctcagtaattctcttaatgttgtttcttatagacttctaataattttaaatacaggaaaaataccttttaaccatttgtcattaaccctctaatatggggaagaaacctcctatcctcttaagttactgtcttacttcctttcttcctttcattgtcagtcagagagggagtgagaggagatgggagcaaggacagcagagaaagagatctcagctgtccctgcttcttttgtgatccctgtattctgaactactacagtccagattcttcagattcttcacagtatacattctctgtggtcttttgacagccttgattactggctgctcctcttcctgtgtcatactccaaccttgtttctagattgctgacattctagaattgcaccacaggtcctgcagtttaaatgctgcctctagataggcaaatctctgacatacactaggcctggtgtctcttttcacctacacttgcacagttatgtgtgctgcttcccacatcatcctttagtgaaccagactcagtgcccagaagagcatctgcgcttgctgtgccagtcccttacaggatacttgtttatattgnnnnnnnnnnnnnnnnnnnnnnnnnnnnntcacaacttcccacaccaagcctgttgcaacttcattcgtttcttcctttttaattttctttctgaaattttcttcctttggtaggagagggaatttacggtcaatctgcttcatgcgtttccttttgattcctacctggatgtatctgacatccatccatccttagcctcagtggttatgtttttagtttgttgcacagtatttgtttcacttatttggcagttgttttaaatattgccttgaaatcattattatatgcttgacttatgttgatatttcacatttagattttacacagcttgttaattcatatatttcctaattcctagaacaaaaatactctgaaattatttagcaaattggaaatattttattgatgttccttaatatcttccttaatatctacctccttatttaatttttttggttttttatgttttgttcactgtattctcatagtctatagaaatacaatttacacacctcttccagaaaaaaaaaatggtacacacctcaaatcccaacacttaggaggcagaaacaagaatcaaagctatccaggttttattgccaaatgtaacacctgcctgagcaatgtaagaccatgactcaaannnnnnnnnnnnnnnnnnnnnnnnnnnnnnnnnnnnnnnnnnnnnnnnnnnnnnggtcactaataaatatttaaagttgtaagaatggagggtgataaaataatttatttcacacttgtagataggttgttctatgtgtcataaactcatttaattgccctatattgccattaatctcagaaatatcatagcctcaagatttttatttcttaaaaagaaatatcaaaacattgttaagctataaggttttttttattatatccctgaaaactgaggaatttttttcatttcatcaaagagcaattttttaaggacttagctacaaatcctggaaaatagaagtttctgatggaattcctagcactgacattattttaagtacaataacactgctggtgcccactattgtaagaccccagctgtcaaccaggtggtccttctacaatagagagagtgtggtgttatttcgtgttcatatttatttttggcaaatgatcggtgccctaaatggcctggcagctagacatctgtctgtaagttttaagacattgatacaaatcagacacatatttccagataaccctgaaaagacacatgtatagcttatgagaaatcatgattacagccatcatattttttacttctctgcatattattttgatcctttattaaagtgaaataaatatttaaatatatgaaaattaagttattatttgagtaactaaatcttagttttattatttggtaatcttgtaacctggggttcttttgctttgcccttgaaactgaaatatgaagttcattccttgtgtactttacactgagtttggtgatctctataaacactatgtaagtctgctttgatgtctatattttagaagcttcctttgttcagttgcatagcatgtgacttactcagtttgactgtattttcctaataaaagtacaatttgtaggtgttgatgcaataatctgaaataacaggcaaagatnnnnnnnnnnnnnnnnnnttcttcctggcttggtaaatgccagcttactttgcaagtgttgttataaaatacctactactcagttaatttagtacttctgaaagcaaacaattagggtccctatcagggaaatttactgaaacacattttctaaagcttcagtggccaaaagacagcactggaatgtgagaaactaattttcgtttgttttacacctcagaatgttacaaattaatcaagtgctacttaaagtctagaactcattaactttttaagttttccttttcccatgacagattaggttatagcataaagctttagtctctggttgattagactgccatccccactgcacaaataccctcttatctgcagtgtagtgagtgagggctgtggtctgtgcagctcaaaagaactagtttactgttacaggggacccagcaggagactactcctgctctgtctgcttactgaagctgggagggagactgtgtgttactcaaacacccatttgttaataaagaaaaggccttactgacattacaagtatttaagcattagattcttacttaaacacccctgagagggaaagttgtacaatgtgtttatttaggggccacaagtgaaatttacatatcaaataaaagttccagacccctaagtagcccgtgccttcttgtggctagaaactcttactcagaaaagacataccaggttgttcctagtagaaaaacaagttgtgtggcatcatagaaagaaacatcgtgtaggaatgtgtatctcctgcaaactgaaaaccatatactgaagcaagatgtaatagcatccatgcctttttaaattttgtgttatgtggaagagcagagtttatgagagctgtaaaacagattgaggttcatagtgaacagggacagaatgaaaagtattgaaggaacagcaggaaccttttgtaattatgaaagacatttcttcattctgtttttctttcttttgtaatctaaaaacagtagcagggggttacaagcagagttcatcacaggttgtcaatcactgtcatttagcatttgtagtggaagatgtctttattcaaagacagctgagcaaatcagaaacacagatttgtagttagtagtctgtccagcctgcactaaataaacaaggccagcgctaacaaccagcctctcatataaaaatataatggactccactgaccttgctgccctccattcagcttcaatccctgttacataaaagcttcactacccacattcaatttcctttaattacctacatgatgtagataagaaaatgaaccttccttatagtcaatgatcacacacaggaaattagacaacttgtttaaaattagaggagtaatttggaagtaaataattctgtatgtnnnnnnnnnnnnnnnnnnnnnnnnnnnnnnnnnnnnnnnnnnnattgggattattttcttagctctgctgatcctgggattgctgcttttctagccaatctaaactgagttttaaaaaaatcccctttgtgagttttctaaaatatccatcataataaaatacttgtgaggacttaagaggtaagcaaagtggtgaagcaagcatgtcacatgctaacgagcttagaaaattgtgaaatggaattccacaaacaaatgtctgtgactttcacaggagggtctggcagagcagtagaggattaaagagcagttgtcttcagtcctcattttaactctgcttctgaggttcattagcaggctaacagcaacagcagcaagaagccagtaatactttttgtcatcaatctaaaagtcacttttcatttgtgtggatcataccatttgagcactgattagaaaacaatgtaaggtttcaaaattatgtgacttttctagacttgtgaggaaaatgattctttggtttctcctatctatacagtaacttcagttagttccactgaagtgtgtggaaaagtgtgttgccttatcacccacaccaagtccttttttcaatattatactaataaatatttaaaagagacctgcttaggatcagagactaaagcccacaatcaagaggtacaacttctgaatatactataagtatattcatattgtctttgaaagaaccaatgttttctcttcctgaatgacattaaaattctgtgattattttagtggccaacaagttggttcagcaggaaaagggagttgatatgagatgttaaaacatacctacttagttataaacaaatatatatacctaaaaatgtaaaccaaaactcaaataattgactcaagttagttcacatcatgtataatattagatatggtgatcatagtcattattataatacctcttacaggaagtctttactgtcacattgaattcttataccaacccccaagttaagataagaatttgggctttgggggtacagtcagtgtcagaaggactcatggtttgtaaacagcagagctagagttcactcatccctgagctggcccataccacatcatccaccctgttgatttgtgtagctctaagacaatgaattacctaccacattctttgaattccacttaatttaaacattgagcagaaaagaaaagctgtttggagtcagggtctcagtggtagagtgcttacccatcaggtgagagattggagtttcaaactcccaccacaccccccaccctcctgctgccccaatcttcaaaaatcaaaaaaggaaataacagctttaaatgatgatagtctttttactgtagataacttaattacagaaatagctgttaattttaggttttattaatatttataagcca

SEQ ID NO: 3383 - DNA, 382 bp, Phodopus sungorus
ctattgcctaaccatcaacaccaccatctgtgccgggtattgtatgacacgggatatcaatggcaagctgtttcttccaaaatctgccctctctcaggatgtttgtacgtacagagacttcacctacagaactgtggaaataccaggatgcccacatcatgttgctccttatttctcctaccctgttgccatgagctgcaagtgtggcaagtgtaatactgactatagtgactgcatacatgaggctgtcaagaccaactattgcaccaagccacagacattctatctggggggattttccgtctaactttaacaacattgccacttgcaatctggttaaatgtgtttacctggaatagaactaataaaatactattgatac

SEQ ID NO: 3384 - DNA, 1191 bp, Mesocricetus auratus
  misc_feature (21)..(794): n is a, c, g, or t
cacgaggcctcctggaggagnnnnnnnnnnnnnnnnnnnnnnnnnnnnnnnnnnnnnnnnnnnnnnnnnnnnnnnnnnnnnnnnnnnnnnnnnnnnnnnnnnnnnnnnnnnnnnnnnnnnnnnnnnnnnnnnnnnnnnnnnnnnnnnnnnnnnnnnnnnnnnnnnnnnnnnnnnnnnnnnnnnnnnnnnnnnnnnnnnnnnnnnnnnnnnnnnnnnnnnnnnnnnnnnnnnnnnnnnnnnnnnnnnnnnnnnnnnnnnnnnnnnnnnnnnnnnnnnnnnnnnnnnnnnnnnnnnnnnnnnnnnnnnnnnnnnnnnnnnnnnnnnnnnnnnnnnnnnnnnnnnnnnnnnnnnnnnnnnnnnnnnnnnnnnnnnnnnnnnnnnnnnnnnnnnnnnnnnnnnnnnnnnnnnnnnnnnnnnnnnnnnnnnnnnnnnnnnnnnnnnnnnnnnnnnnnnnnnnnnnnnnnnnnnnnnnnnnnnnnnnnnnnnnnnnnnnnnnnnnnnnnnnnnnnnnnnnnnnnnnnnnnnnnnnnnnnnnnnnnnnnnnnnnnnnnnnnnnnnnnnnnnnnnnnnnnnnnnnnnnnnnnnnnnnnnnnnnnnnnnnnnnnnnnnnnnnnnnnnnnnnnnnnnnnnnnnnnnnnnnnnnnnnnnnnnnnnnnnnnnnnnnnnnnnnnnnnnnnnnnnnnnnnnnnnnnnnnnnnnnnnnnnnnnnnnnnnnnnnnnnnnnnnnnnnnnnnnnnnnnnnnnnnnnnnnnnnnnnnnnnnnnnnnnnnnnnnnnnnnnnnnnnnnnnnnnnnatgcttgttcataacaagttggtggaccccctgtatagtatcaaggagaaggaaattcagaaaagccaggctgctaagaagccatacagcgactagcctgtgccaagtcacgagtacctccgagcgagacaggcaggtctttctggaaactgtaagagagtaggattacttcgcttcagttcactgtggttgctgcagacccttttggctaggaacatactggctgtggggaacattgagtttagctatggagaacagtgtttataacttttacctttttcagtcctggggtttgaacctagggccttgcacatgccaggcaagtgctctactgagctatgtctccaacttgtttacaatgtgatattttctattaaatctaatattttcaaaaaaa

SEQ ID NO: 3385 - DNA, 694 bp, Mesocricetus auratus
atggcctcagaccaccagacgcaggcgggcaagccccagcccctcaaccccaagatcatcatctttgaacaggagaacttccagggccactcccatgagctcagcgggccctgccccaacctgaaggagactggcatggagaaggcgggctctgtcctggtgcaggctggaccttgggtaggctacgaacaggccaattgcaagggcgagcagtttgtgtttgaaaagggcgaatacccacgatgggactcctggaccagcagtcggagaacagactccctgagctctctgaggcccatcaaagtggacagccaagagcacaagatcatcctgtatgagaaccccaactttaccggtaagaagatggagatcgtagatgacgacgtgcccagcttccacgcccacgggtaccaggagaaggtgtcttccgtgcgggtgcagagtggcacgtgggttgggtaccagtaccccggctaccgtgggctgcagtacctgctggagaagggagattacaaggacaacagcgacttcggggcccctcacccccaggtgcagtctgtgcgtcgcatccgtgacatgcagtggcaccagagaggcgccttccacccctccagctagagctccaacctccccctccccggggggcaggcccactacccaggggcctcctgacaccagagtgaataaagtgtgg

SEQ ID NO: 3386 - DNA, 506 bp, Mesocricetus auratus
  misc_feature (78)..(97): n is a, c, g, or t
ctgcaggcgctcgctctgagttgactgcaacgcccggccgctttgcctggaagaagaggagcctagtaaatccggctnnnnnnnnnnnnnnnnnnnnactgacttgcaatgacatcaccaaacactgagcacacctccctctctgcccccctccccccagcacccttcccccaccccagagcagctctgctgccctggtccgccaacctcacagggtcaggctgggccagctgcaaccagggcactcaagtcacctcgtagccacctccaagatgctcgcacttcctagttgtaggtggctcagggtcattcctttctctctgtccatgttccagactggtttgaatctatgtcagactcttgcatgactctccatgcccagactttttctttgttctctttgctcacacctgggaacccccctgacctcagtccttcatcccgctcccgctcagcttgctttctttgtaactagcctgtggtcccggaagtctagttaagtatac

SEQ ID NO: 3387 - DNA, 1631 bp, Cricetulus griseus
  misc_feature (95)..(115): n is a, c, g, or t
  misc_feature (256)..(274): n is a, c, g, or t
  misc_feature (585)..(606): n is a, c, g, or t
  misc_feature (1322)..(1408): n is a, c, g, or t
ccatctttgcaaaggaccaaagtagacatttctccaaagaagacatggaaatggctaacaggtatgaaggaatggcaatcaaaaccacagtgagnnnnnnnnnnnnnnnnnnnnnaggttaagagcactgactgctcttccagaggtcctgagttcaattcccagcaaccacatggtggctcacaaccaccttgaatgagatatggtgccctctgctgtcattcagacagaagactgtatacataataaacaaaannnnnnnnnnnnnnnnnnncagtgagctatcatttcatactcagcaagagtagctacccctccccccataacaagtacaaagaattctcctgttggcggaatagaaaatggtgaaacactatgaaaaacagtgtgaaggtaattacagaaagaaactaccgcacgatccccaaattcccacatctagtgatataagcgcccccccattgaaatcattatgtcaaagagataatgtcatcctctgtttattgtagcacaattaaccacagccaatgtacgcaaaaaacctaaatacttatcagtgggttattggataaagaaaatgtgttnnnnnnnnnnnnnnnnnnnnnngaaaaaaagtatgcaacacacaacaacatggataaatcgggaggtgaaattaaccctttacagggaaacagatattgcataattccacttggaggagatgtctaacaaaggtgacttagttattttatccccgggttcctagagccttgttttcacataattgttctgttaattctttgtacttttcttttcttttattagaaagctacctgtaagccctggcttggatttattttcttcttatattttaaaatgttatgacagagaccggagagatgggttaagggttaagagtatgtactgctcttgcagaggacctgagttcagttcccagcacccacactgtgtggctcacaacttcctgtaactccagctacaggggattggctgcctctggtctccatgggcacctggcactcacattcacatatcatacacagacacatacacaaataattttaaaaatctttaaaagtgttaaaggagacctaaatatgctcttaaaacacagatcacatcaggaatgaaatccactcctggtgtctgaaataattgtctttactgacctttccagcaggaaaaatgttcatctcatagcaggtaatttttcttttaggggtggggctctgtcaactttgaatgcattggaaatgtagagttttctggccttggcagaaattataaaagtgaaacaacagatgaaaacaaaacttttnnnnnnnnnnnnnnnnnnnnnnnnnnnnnnnnnnnnnnnnnnnnnnnnnnnnnnnnnnnnnnnnnnnnnnnnnnnnnnnnnnnnnnnctgtctcaacaaaaccaaacacctaagactaaaagcaaaccaaaccacagcagcaacaaaaaaaaaccctataaaacaaacaagggaacttcagctgcaatacaattaaaaagaatatttgttaagtacaggacctagaccttcaaaatagcgcttttggtacacagtgagctaaacacagtcgaggtagcaaagattataatcgtgcggcaaagacaagctt

SEQ ID NO: 3388 - DNA, 2538 bp, Cricetulus griseus
  misc_feature (437)..(450): n is a, c, g, or t
  misc_feature (452)..(465): n is a, c, g, or t
  misc_feature (625)..(664): n is a, c, g, or t
  misc_feature (1303)..(1325): n is a, c, g, or t
  misc_feature (1768)..(1786): n is a, c, g, or t
  misc_feature (1852)..(1866): n is a, c, g, or t
  misc_feature (1868)..(1885): n is a, c, g, or t
tctagatttatgatggtaaatcatggggcacggcacagcaatgagaatcgacatttatatattactttaacaacatgttaaagatgtgttaattttaaaagcaaatttatacataatagaatctcgattgaaaaaaaaaaatcacttgaatttagcatttggtggcacacacctgtgaccccagtactaggaaagttgtgtaaaaggagcaagaattgaaggccagcctaagctgcataggagactgtctaaaaaacaaaacaaaaatactactttttaaaaagtggggatggcaagatgactcagtaaatgattgctggtatgcctagcaatctcaactccatctctaggactcaccatacactccatgacaagtatacatacacacacacacacacaaataaatgcaataaaaaatttttgagtcagatgcagcnnnnnnnnnnnnnnannnnnnnnnnnnnnagagtttgagacaagcctggtctacaaagtgagtttcaggacaggcttggaaaaaaaaattgaaaaaagtaactggaaggaaaaaatataagtatctaaaaatatgttcattcatatatatatatatgtatttataatatacatatatatgtacttatannnnnnnnnnnnnnnnnnnnnnnnnnnnnnnnnnnnnnnngtacattataagcaaactcttggtaaaattggtaggccaggataggatttgtacttcctatttttctgtatcctcaaagtttttttttttctactcaggcattttacttatatgtttttgttttatgcccctagaaaaagaatcccagggtgaagcctcctgtgtgctttcatcttaatttttcatgcttcatgctgccaccttagtggcagtaaaaccaaggctcttagtgcagtaaaaacaagccggcagggtggtagtggattattctgtccattttccctaggtctctgagctgctcatcacatttggggctcaccatgccatacttgttcagcctggaagtgaggctcactttcccagctctgtgattagcaatgactgccatcaaggccatgcttcaaccgcaggtgggaaccaggtgaggtccctcgagtacaggctgataaggatggggtgtgcatctatctcctcagcatcatttgtactcctggagcaccagccaggaaattcatgtgacccatatggcattgcagaaagtttcttttttagctggcaaagaccttccctaccttttaaagattagttgctcctgggctgagtgtacagctcactaacctagtatatgaaagggtcatnnnnnnnnnnnnnnnnnnnnnnnaatcaaattttaaaaagggggaaagattcactcttgataaatgtttgaaagagaaatttctgcaaaaattaaaaccaaagtccagtttatacgaaattggcgaggctgctaagaaagttagtgatgcactgagaaacgctgggcaggaagatgaaaggaaggatttgatttaatgacgattcagagaatgaatatggaatcctcagtgctggtatgggacaggcagtgctggccttcaagggatggtctagatctacaaatcctgcttgcctgatttccaaaagttagcgcccattagccttgacaagcattgtgtttgggggagcacagacaaggcccagcggagacccttagacatggtactgtctccattctgttgctggatatttctaccttcagagcccatttttctttttcttttctttttttttcttgatttttcnnnnnnnnnnnnnnnnnnngctttggagcctaacctggcactcgctctggagaccagactggccttaaattcacagagatccgtnnnnnnnnnnnnnnncnnnnnnnnnnnnnnnnnngagtgccaccactgcccagtgagcccatttttctaagcagaaatcagtctgggtgtttgtttttctgtgtggcttattttgtgtatagccttctgtctagctctaactccagcatttagttcagaatgtctaaaatggattggctaggagccagtgagagtcaggaggggaagtagagctgctttggatctctgggcgcacctgctacagtctgaggccagatacagatgggccctcctacctgctcagagtcaggggttagggagtgggggcckgccagtctctgtgggctcccagccaagccctccatcacacaggcttacctattctgaggcaggaggcccctagtgcctctccacccaacagcagctgtggcaagcatctgcagcctacacaggaagtaccctgtgctgtccagggcctgtctgcttcccttctttacaggcacagcaggcaaagaggtgcactgcaaattgcaccatagacttggggtagaaagtgaattgctagagataaactaaaatacaagcagctccagctccagctccttacaacacaatctaacagtgatgtctgtcaccatgcctgccatctttacgtcagaatccccaagggagagatctggaaagagtattgtagacaggctatctaga

SEQ ID NO: 3389 - DNA, 3573 bp, Cricetulus griseus
  misc_feature (1321)..(1338): n is a, c, g, or t
  misc_feature (1437)..(1469): n is a, c, g, or t
  misc_feature (2239)..(2281): n is a, c, g, or t
aagcttgattctagaaaggtctgggaataggatggggcttagggaattgccctgggccagtgtccctgggaagcttcagctgttttctcccaactctagcatctgctagtagaggtctgttcctagtcagggagcagaacatccagctgagaagccatggcggaaatcggttaggaggagaaagctgtgttttgaggcagggaagtcccagagactgaagtagcagtaaggcttcaataccagaaagtccaaggccacagataacccattccttcattccccaggctttgctctgcatagacaatgaaaccccactgaaattctgcctgtgttgagtaggtgggacactgatgcttagctggaagcagagtgaacttcccaacaaccactacagagcacatgacctggaagtaagggggtgagaaagagttatatagtgaagggtgtgttgttgctggtaggacttcaagatgaaggcgttcatgaactggtttgcctgggttgggtggagaacagggttaccacctattagttggggaggtagttaggtctggacatagacctcgaacagtgtgagactgtgacccttacaattatgtcaaaatctgcatcttaccagaatataaatgagcatctttatggtcacatggtacctgattaattttgggatttattttgttcactattggaagctaacattttcacaatgtctaagggccggcttcagaatagcccactttctaagtctgggagctattacaggtgattccgagagttctgcagatttttgttggtttccattctcttgattatactgtaactttctgtgtgtttcttttctgtgtatatcacatctatcacaattaggaccattctatttgtggagtttttgcatacgtcctttcacctaactttttgttgtaaacattttcacatgattaaaaaaaatctccaagaatagtattaatggttgtatttcattgcattcatttaaacattcccatttaactgggaggtggtgggaaggcagaggcaggcagatctctgagcttgcagtcagcttgtacagagtttcaaaacagccagggctacacagagaaatcctgtcttggaaaaccaaaaactgaccaaacaaacaaaatcattcccctgttgttgggcctttatgtttccaaattttctgtggtaaatattgcaatattgaacaactttgtggaatttttcagacaaccctttatttttactattagtattggtttgtttttggtcttatttttggttttggttttgtttttgagatagggtttctctgtatatgccnnnnnnnnnnnnnnnnnnctctgtaaacaaggctggcctctggcaccgaatctcaaattcaaatcctgctggttctgcctcccgggtatctgggactgcccaggctcagagaactcnnnnnnnnnnnnnnnnnnnnnnnnnnnnnnnnnacagttttgtgattcccaccccctgaagaaatccctagaagctgccatgggattagctgggtctgcccatcctcctgaattctgattgagaaaggtataacttctttctttcttttatttctttctctttcttttaaacatgtcttcccttctcttgcaggcatctgctgagagtcacaagttgcatgccctgagcttttcctttaaacaccaataaaattattttttgatcttcaaaaaaaaaaaatagacttgttaggagtcaaaaacagtaaaacttgagacccttgattatattttgctagatggttcttagattatattagtgtttatggccacataacctgtgtctagttcaacacaccctcatctgtactgagagcttctaatggccctgttttgatatttaaacataacmaagtaagaacaaggtatctcttgttctattttagtctttgatgctctgtgaactggatttcccccactgccttcccaagtttctggaggccactgtagggggtttcttgtttgtgtttttgtctttttgcctgccatggtgggcattgcctctcacgtgtaagacagagggatgctgccacccagccctcaccccaatcccaaggcaattatttgcaaagtttaagacaggtgacaggagacaccctagaggccgcctcagatatagagagaatggggctcagacccagagttcagggtggggacaggagggaagggatgtagtgtggggaggtaagacctttagaacagcnnnnnnnnnnnnnnnnnnnnnnnnnnnnnnnnnnnnnnnnnnnggcaaaggactccctcaagggcaagggaacaattgcttctcataaaggtaattacttcataaaggtaaggggacttcccttacaggtttcctttaggtaagactggcccttgaatatgggaatgctggtttgggagggccggctgtggccctgtgcaaacacttaacccacaaggagagtcaatgagttgcattaaggatcccagaccaaagcaatgttacatgaacactgattgggtagtaacttacaggccagacacaggtctaagcacttataattaactcacttatcttcaccagtatcatatagagcagatactcattttacagaaatagcaccgagaatttcagcgccagtcaggaagtaggtggcgatgcctgaatttgaacctagacattctggctcgtctaacctcaacatagaaactaacgtgggatgaggaagccagccttcagggccaatggcttatagaaggaaacagactcaggtgggaatgcggggaatgcaagggcagggcttctgcttaaaatggattctgggaccctaataatagctttctgacttgtgccaggcattgtgcaaagggactttacattcaatcttcagtaagtcctttgaatgagacactatcattaccttatttcatcttactgatgaggaaactgacccacacgaagccscccmagacggaagggccaagccaggccaaccctggccggggtggcgcccacgtggcgttaaggaaacagggaaaatggtgggggtgtggccagagggccgggggcgtggccgaaacggggsgtgaccgcagacttggcggggcctggggcaagcgaggttggcgcgcagccgggaaggtttaggcggggtcgcacctgttgcgcgactgccccacggccccgccacgggattgggatctctaattgattcccagaaactagtgaaagaaccctaggcgaattccgggttcggttttctgtggagcacgtggcctgcttcctcttgagtgcgggctgggggtcgcgacaccggggtctcctgaggtcagtctggcagctgaagcccgtgggagtccgccttcgtccagctggccattttgagaagcagccttccttcccgcctcagtgcgggtgcaggggccaggggcgcgacttcgcccctgtgggccctctcctctcctcagccgcgcttccccgcggtgtagactaggcagcctccctggtaccactcgggactcgggcagtatggcctcaggtaagcgtgtggcgcgtgtgttggcgttagagggatcc

SEQ ID NO: 3390 - DNA, 8567 bp, Cricetulus griseus
  misc_feature (370)..(453): n is a, c, g, or t
  misc_feature (2010)..(2036): n is a, c, g, or t
  misc_feature (2582)..(2614): n is a, c, g, or t
  misc_feature (5493)..(5515): n is a, c, g, or t
  misc_feature (5794)..(5811): n is a, c, g, or t
  misc_feature (6507)..(6539): n is a, c, g, or t
  misc_feature (8417)..(8458): n is a, c, g, or t
aaccttcagctctccaatgcaagtgaatccacaggaacagagacttttaggtgatgagctcttcagaaggtaagaagatggccatttcctcccagagccccagtacctgcattctaccctgctgtgtcaaaacccagatcatttccctcactgtagaccgtcagagtcttcgaccttttactggcagagcttttaattggcttaccctgtcatgctgctagatataaagacaatccctagattaagaagtagttctccagctggagtagaagagtctcaaaccacggtaggcagagagcaagaactagaagtctgcactctcatccaacttttatgggagcaagacaatgttactctatcccatcctggnnnnnnnnnnnnnnnnnnnnnnnnnnnnnnnnnnnnnnnnnnnnnnnnnnnnnnnnnnnnnnnnnnnnnnnnnnnnnnnnnnnntgtctcacagacaggagccttactggaaaactttaagagctagagaaagcagtttttctctgaggagacaacagagatggggagtggaatcagtgctgaggacaaagaacttgccaagaggtccaaggagctggaaaagaagctgcaggaggatgctgataaggaagccaagaccgtgaagctgctattgcttggtgagtgacatgagcagatgaactagtggttcattttctttgattttctggtgggttgatgggggctggccaaccccacatgtgttcttctcatcctggtccagtctcaagctaaaaaaccaagcagagcttagagctaagttaatatggagcctgcacagtcaccacaagggacccagaatgccaggggcactggaattgttttacttttccttgaactatgaatagtgcaaagacaaagctgggctacccaactgcaacaacagcctttttttggttcaacaactaccaagaaccctggccatgcaggcacacaccaatcctgctgtcagaaaactatggcatacaataagtaaacagaactctttctcagccatggatccataaagtcacatgaccccaacacatagtctcaaggataagcctactgatctctgccatgtagactggattcttgtccttgctttcaaaataaattgctggagaacctggtagggaggggagggccacaggaaagatggaatctttaacaacagaatgccctcctggctttctagtaagaaattgccactgacatctggaaggctcgtcaacttgacacattctaagcacatcactggttggtgcagagatgagaaaaggacctctgtaggtcaatcatggaagcagatcatggtttcaaatagaaaataagaaactgacacctggctcaagaaaaaccccagaaacaaaaacgccaatggtactactgaggtggggttgctggatctatgcagcagaaagctgtctgggtttctctaaagaacctgggggccggagcagtaaagcaaaagggtgtgggggtcggtggggcctatttgtaagctggacccaggctctgaggaattcagcagtcacatacaggaacagaggctgacagacagatcttttaagcctaagcagattgtctaggttcaggataagcagcttagaagaaacaagcacaggcaaggtgggaggagacttagggatcaggaaggaatgtgagttcttgatgggtaagaggaccgcctaaataaggacattagaatgttttagtcaataacagacaccatcatggtagggaaaattatctcagtgaagagccccagctctttccaatcctaatcaagattattgcctgtgtcaaaaataggcagtgtgaatattttaaaggaatttatatgatctatcagtggttcccaatggagagacttcttgagtcccagaggccacaaaacatttggagatacttggttgtcacaactaagagtgggatgttagtggcctctagtgggtagagacaaggaatggttctaaacagcttacaatgtataggacagcnnnnnnnnnnnnnnnnnnnnnnnnnnnccagtcctcagtgcaaatagtgttaatggggacaagctgctctaaatccaggttgaatggcctgagctcatggtgtctctcggtaagtctcccagaaagcactgttcacataccatcttctggaccattgaggagaactggtgggaactgacagcatggacatttcccttccaggtgctggagagtcaggaaagagcaccatcgtcaaacagatgaagtgagtggcaacataacgggggggggggaccaaggtgtgggagtcagtggagcgggtcatgatgttgagcagaagggtccttagctccaaaggacctgattttccacatccctccccttaccctgcacttggagacagcagtagaagaaatacaggtggtttcctatgacccttatatcctccccagaattccaatctcttaggtctggttcctcaggccctgctaaaagtttagtgtctgttccttgaaggatcattcaccaggatggatactcaccagaagaatgcctagagttcaaatctgtcatctatgggaacgtgttgcagtnnnnnnnnnnnnnnnnnnnnnnnnnnnnnnnnntaggcattgactatgctgaagcaagttgtgcggtacgtgattaatgttatctggttcagggtggaagcaggagaagaaatagacaagagagcaacaaaccacaaggtaagtcgggtaagaaaaagttctgtgtaactcaaatcgcatctgctaatcttcaaatcatcttagtcctaggagagtaaacaacctctacctttataacaaatgtttacaaattcaaaccccagcaactttttgctttttaatcttattttatcacttaaattctctctctgagcttcttgcactagccatgggacttttacaagctatacactgaaatacactaggttatgtattgcagggccgattttaaattgccagtccctgcagcaaaggacctatcatttcagcctaacctgaaagatcatctgggactgtcctctaggcgcatcccagggctggctacatctgaagtaaattagcatgtttccttaaactgtgcctttactcagactgttctaccttaggctttggtagcaatgcagcatgctttccgttcagtaagttcccagaaaccacctggaaagtcactaaagtcctccccgctcattctcaaccacatttctggattacacaggattcgggtcgacagctcaacaacctggccgactccactgaggaggggaccatgcctcctgagctggtggaggtcatcaggaagttgtggaaggacagtggagttcaagcctgctttgacagagctgcagagttccagctcaatgactcagcgtcttagtaagactatggggaggaggggggaatgatgctcaggagaaatctcacccagccttaagttccaggcagtgggagctgcagacccacaaactgaactatagagacatcggcccgtttccctgttttgcatttctttatactgcctctctgcagcctatgaagctgaagatacaaaattcaaaacaggagctctgcttagcagtccttggccctatctcaagaggcaaaccaaagaaagatggccagacactgagaccatcaactttgcaaagctggttccaaaaagataagggacacagttatcaaccctcaacagtgcagtaccagaagtgggcatgagttttaagaccaaacaaacccatgtttaccctgttacctcatcttgcaataatgttatcatttagtttctggaatcctctcttccctgctaggtgcacaacatacactctatctcagggcccttgtttgtacactagccttcaagatacattaaccccattttctagtagaaaacctgcagtcagatgaagttagttaacttggcaaagactgtgtacataaacagcagaggctgcacttgggttcaggtccacacaactacaaagctgagtttctatagtatgccactgggctttttttctttctttctttttttaaagattttatttatttatgatgtatacaacattctgcttccatgtatatctgcacaccagaagagggcaccagatctcataatggatggttgtgagccaccatgtggttgctgggaattgaactcaggacctctggaagagcagtcagtgctcttaacctctgagccatctatccagccctgccactgggctttcttatttcaggttgagatacagttttactttgtagccaaagctggcctgaaactcagccctcctgcctcagtcacccaagtaatccctccgaagttctcctttatctataaagtgggaacatgagtctcctagtcttctaggatttagtgagaatttacttgtgagaatatatggcatacaacagaaatgtcagttttccttccctctccatattaagtcattttacttcatatctgcctctttgtaccctttgtgaaccccctcatgttcttatgaaaacttctaaacatacaaaagtggaatacacagtgaaccgtccagtttgcagttgattcatggcctttcttagctcacttaacacccctcccactggattattttaaaatactctgcagctatcacttcatcctaacaatttcattatgtatttaaaatgcaaagaagaaatcatatcatcatacctaaatatttaataatgccttaatatctccaaatatcaaagtgtgttcatattcctgtttgactcaggagagaaggtgcacacactgccttgtcttgtgtcttcagattctctttcaatctatttcctgtctcttgatggaactttggacacatatataaacaagtcttattcaagggtctagaaaggcttagtcaggagaacagaacacttccctcctggaggtgtggcccttcaccctctttctttcctgagaacacaagggtttgcacagccctggattcagggctgtggaattccagtcctgcttttatcactgtatcagctgtgtgacttagggggacaaccttggcctcctttagccttgacttcgaagactgtaatatcaccaatgccactctcttttgctagctacctgaaccagctggaccggattacagaccctgactacctccctaatgagcaggatgtgcttcgatccagagtcaaaaccacaggcatcatcgaaaccaagttttctgtgaaagatttgaatttcaggtcagcattcagtcctctggggcatcccaggtctcacagcatgtttcttggcctttgctgaagcccaatccaaattactgttctcctcctttcgcttctcctgtttctgattttgctactaactggccccaccaagcagccgcctctccgggtgaataccaaaggcaagtgagtcacatggtggccacacccatgagaacagccgtttcttcccttaggatgtttgacgtgggagggcagagatcagnnnnnnnnnnnnnnnnnnnnnnntttgagggagtcacctgcattattttctgtgccgctctcagcgcctatgacatggtgctggtggaggatgatgaagtggtgagtggtgtttattccagtttcagtggcattggatttcatgtgccgctctcagtgcctatgcatggtgctggtggaggatgaccaagtggtgagtggtgtctataccagtttcagtggcactggatttcatgacccccttctccaaaccttgtcatttcactgcccaactggctaacactgacagcctaggcatctccnnnnnnnnnnnnnnnnnnctcagtttactaataactccagaaaactccttttctgctgtaggttctaggttagcacttcaaagctccaaatttactgagcgtgagttcggtctgagaataggaatccaagcattttaaagccatcacaaagctcaagaggaagtgatactaagtggaggcagagagatgaagtaggcagtgcagggacttaagaagtctatctatatgccagttcccttctcccgagttttgagatgaagtcaaagatgtgaaaacactaatgtccatgttggccagctactcaacagaaaatcacagcttttagcccactgtcactccagctttggttctctttccttctccttaactggtagggttcacaatggagcactctgtaccttttagccaaaatgtcttatagcatcatcatttacattccaagatcacttccattttaccccaagtttaccaggtacttaactatcaacagcaggagcattgacagtgaggaaaggctgcatatcagttttccctgattagatgacaaaaatgaattcaagtcagctgatggcacacttcaggtccctactggcctattccctaaatgctcacctgatgtgggtactggctaatgctggactctgcggacacatgtctctcctctttcaaagtagctatgagagaagaaggaagaagtgctgatggtttggtacnnnnnnnnnnnnnnnnnnnnnnnnnnnnnnnnnggggctaaagaatccatgtcacagtcatgccccagatgaaatctggcatcccctgacataagctagcaaaagcaagtaacaaagtgctaatctgggcttggttgcaggccccccggatattacctggctctggcagctaaagatctccacatacagttattcttatagccagctactaccatgggtacacagacacatgtcctctttagcattcataactatgaggaaacagagactctgggatgctaataacctccctcaaatctgagctattaaaatgacagaaaggaaatttgaatgtttggttgtaccccaccacactaaaaacagatgatctgttcccttgctttacctttatatttggaacactggtctgttcagttagaacaggaataaacagacgcctacatcccacaagctgatctgctattcccacaatgtttcttcaccagaatcgcatgcatgagtctctgcacctgttcaacagcatctgtaaccacaagttctttgcggccacttccatcgttctcttcctcaacaagaaggacctctttgaggagaaaattaagaaagtccacctcagtatttgttttccggagtatgatggtaggtgccaactgctgcagacaagagtgatgtagtaataggattgcctcatcccataggccaaaagcacaaaaaggaacttaccaggcaaaggaggagacacagagacctttcctccttttccttgtttcactcaagtgagaagtaccggcaggctccacagagcattactcctgacagccacctgcaggcaggacagtccccactcccctgacagtcacctgcagggacaacaaagcccccagctcccctgacagtcacctgcatgaatgacagagcccccactcccctgacagtcacctgcatgaatgacagagcccctgctcccctgacagtcacctgcatgaatgacagagcccccgctcccctgacaatcacctgaccacgatctgtctaatgcaatacttcaagaagcaaattagacacctgaaaattgagcacttagggtgatttattccattttactaatttcttttaaaccagggaacaactcctatgaggatgctgggaattatatcaagagccagttccttgacctcaacatgaaaaaagatgtcaaagaaatctacagtcacatgacctgtgctacagacacacagaatgtcaaatttgtgtttgatgcagttacagacattatcatcaaagaaaacctcaaggactgtgggctgttttaatgctcaggtttcctcagatgtacattctacaagcaggcttagaaactgagaggctgtttacagaaaactaatcaacaagaaccagcacatgacgaataagcccattttgttggagacacagaaggcatgcttacaactgttttcaagtagtgtggctagtacagtttaaagaatgtgtggccaagaatcgtaagacccaggctccagtactggttctgcttagcacagtagaaatttttctgtagcaaaattcccctcgcctatataatgaaggtcacttccttacctacttcacagggccattctcaagagcacaaatctaactgaagggaaagcacatggaagctgctgtggttggcggcaaccgatgtactatcacacttggttattagaataaactatctcaaagtgtatcagcaaaacttccttacattgatcgataaactattaaaaattaaaccctgccccctgggtttttactagcagatcaatatgcctctgctcagagacccgcatcactggagaaagcatgtgagtcctgcctcatttcttagggcattcattcagaaatgaccgtctttattatcccactctcccnnnnnnnnnnnnnnnnnnnnnnnnnnnnnnnnnnnnnnnnnntatactgttaagtagtgtctggctgaacttgagggcatcagcataccccccacttaagacgttaccaccgccacttctgtaggatttgaacaagcaagcaatctgaatt

SEQ ID NO: 3391 - DNA, 1097 bp, Cricetulus aureus
  misc_feature (1039)..(1097): n is a, c, g, or t
gagacgcgcttcttcggccgtgccccggcgctggctgattgttgggcggccggcgccatgtctgtgagcgagatcttcgtggagctgcagggctttttggctgcggagcaggacatccgagaggaaatccgaaaagttgtgcagagtttagaacaaactgctcgagagattttgaccttgcttcaaggggtccatcagggcactgggtttcaggacattccaaagcggtgcttgaaagctcgagaacattttggtacagtgaagacacacctcacatctctgaagaccaagttccctgcggaacagtattacaggtttcatgagcactggcggtttgtgctccagcgtcttgtcttcctggcggcctttgtagtatatttggaaacagagaccctggtgactcgagaggcggttacagagattcttggcattgaaccggatcgggaaaaaggatttcatctggatgtggaagattatctctcaggagttttaattcttgctagtgagctgtcgaggctgtctgtcaacagtgtgactgctggagactactctcggccccttcacatctctactttcatcaatgagctggattcaggtttccgccttctcaatctgaaaaacgactccctgaggaagcgctacgacggcttgaagtacgatgtgaagaaagtagaggaggtggtctatgatctttccatccgaggcttcaataaggagacagcagcagcttgtggtgaaaaataggagcctctccctgtggctggccttgccgactaggcatttgccagggagggctagcacagtgcctctcctctagttagcacgccagttgctaaacactgcgctttattttcgtaaccagctgtgtggcgtgaatatcagaattgagatactttttggatctaaaaaaaaaaaatcctttccactgataggattttctttgttgacgtttcagtgaacttgctgtgtaatttgttgtagtatcattttgtcaaaagtgtaaatgttggtctcttggtaaaagtccttttcttgcttnnnnnnnnnnnnnnnnnnnnnnnnnnnnnnnnnnnnnnnnnnnnnnnnnnnnnnnnnnn

SEQ ID NO: 3392 - DNA, 369 bp, Mesocricetus auratus
cctgccctgaagggggaaaatgaggaaatctggcacgtggtcacccggaggggtggtcgggtgccttcctaacgctccagtccgggtgctgggcgcctgcatcccccctacctctgcagacagggtcttccagggcggctcgcccgcgggaagcgtggaggctgccatggccacgtccggctcagaggccgagctcctggctttgcagggacacgaggaggcagggggcggggcccacacgcgccccgccctcgccacgcccctgtctgcggcttggattggtcggtgagtatttaaagaaaagcgcgaaagcgaggtcgctttccactcaccgaccccggccctctccgctgaggctcgcacagccgc

SEQ ID NO: 3393 - DNA, 308 bp, Phodopus sungorus
ccagttctcccaggacattggacttgcatctctgggagcctcagatgaagagattgagaaactctctacggtgtactggtttactgtggagtttgggctgtgcaagcagaacggggagctgaaggcttatggtgcagggctgctgtcctcctatggagagctcctgcactccctgtcagaggagcctgaggtccgggcctttgacccggaagcagccgctatgcagccctaccaagaccagacctaccagccggtctactttgtgtcagagagcttcagtgatgccaaggacaagctcaggacctatg

SEQ ID NO: 3394 - DNA, 1161 bp, Cricetulus griseus
  misc_feature (743)..(758): n is a, c, g, or t
ccacgcgtccggacagatcaaggacagaaatctctgtcctttctgatcgtgttacagatgtaggaagtgtagattttccaggttattattttgatgaagacaacatctgggatcttgataaatttaaaaaaaatttaaaagtttcgattacgtctctcgatcaagaaacaatggtatttgaaatttctggaattgatgcatccattgcaaatgcatttaggaggattttaatcgccgagatcccaactcttgcatttgagttcgtgtatatcataaacaatacgagcataatacaagatgaggttttgtctcacagaataggtcttgtacctatatctgctgatcctgacatgtttaaatggtttcaacatcctctgccaggacaagaggcaactcatactgattacgatactgttgtcttttcccttaataagaaatgcgagtttaataagaatgccgctacagatgaaaaagatccaaagagactttacgttaactctgaggtttattcgggtgatctaatttggaaaccgcaaggtcgacaggaagagcgatttgctgacaatcctatacgagtagtcaacccagatattgttgttgcaaaattgcgtcctggccaggaaatcgatttagaagctcatgcaatcttaggtattggacaagaccatgctaagttttctcctgttgctactgcctcctaccgcttattgcctactatacatatcttgtctcctattgaaggnnnnnnnnnnnnnnnntttcaaaaatgcttccctaaaggagtcatcgagcttgaggaaggacctgatggtaaaaaacaagcccgtgtagcagacgttcgaaaagacaccgtatcccgcgaatgcttgagacatcccgaatttgcagataaggtgcaattaggccgcgtacgcgatcattatttgttttctgttgaaagcaccggtattatgaagcccgatgtcttgttcattaaaagcattgcagtcctaaaatcgaaatgtctagccgtaaagtctagtcttcagaatattttttctgactgaatgtctgttaaattagttttatatgtaatcttttggataattgggtacgctgttaaaaaatatacttttgaaagttattgatttttatatttcaatattaacattttgtcctttc

SEQ ID NO: 3395 - DNA, 665 bp, Phodopus sungorus
  misc_feature (224)..(242): n is a, c, g, or t
aactggaggaggacgagtcggcagcagccagcaccatggcagtctctgcctccctcatgccacccatctgggacaagaccatcccctatgatggcgagtctttccacctggagtacatggacctggatgagttcctgctggagaatggcatccctgccagccccacccacctggcccagaatctgctgctgcctgtggcagagcttgaagggaaggagtctgcnnnnnnnnnnnnnnnnnnnccaccatcctcctctactgctgtctttcagccctcggaaaccgtgtccagcacagaatcatccttggaaaaggagagggagactccaagtcccattgaccccaactgtgtggaggttgatgtgaacttcaatcctgaccctgctgacctggtcctctccagtgtgccaggtggggagcttttcaaccctcggaaacacaagtttgcagaggaagacctgaaaccccagcccatgattaaaaaagccaagaaagtcttcgttcctgatgagcagaaggatgaaaagtattggacaagacgcaagaagaacaatgtggcagcaaaacgctcccgggatgccaggcgcctgaaagagaaccagattaccatccgggcagccttcctggagaaggagaacacagccctgcggacggaggtggctgac

SEQ ID NO: 3396 - DNA, 714 bp, Cricetulus griseus
agctgcagcgcttagagggaggagtggcggtggcgcgtcacctggcagcggcgtagcagcagtgaagtatttgaagtaaagaagaaagcacaatgtcctcagtgttttctgaatacaccattggtggggtgaagattaactttcccttgtaaagcttatccagcacagcttgctatgatgaactttattgtcagaggactaaacagtagtcagcattgtttgttggagagtcccacaggaagtggaaaaagtttagccttactttgttttgcattggcatggcaacaattttctactggaaagccggtggatgagggcttgaataaaaagcttgaggtgccatcatcatgctgttgtgcatgccattcaaagagctttatgtacagcaacacggacatgggtacttcccctcatttcagtagtccaagcaaactgtctgagagaaatggcttttcaccaccctgtcaagattctcctgaaaaaaatactctggctgcaaagttatctgccaagaaacaggcatctaaacacagagatgaagatgatgattttcaaatggagaagaaaagaatccgacccttagaaactgcacagcagatgagaaaacgtcattgtttggaaaaggatgtccaccatttggatgcacgggtagcttcggaaaagaaagtaaaacctgagtctcctgtaggaaagacaagctcctctttccaaaat

SEQ ID NO: 3397 - DNA, 1959 bp, Cricetulus griseus
  misc_feature (349)..(363): n is a, c, g, or t
  misc_feature (1722)..(1783): n is a, c, g, or t
  misc_feature (1939)..(1959): n is a, c, g, or t
gccgcagccagctgtctcctcctagcgctgctggggcggcgggctatctaggccggcgcgtctctatggctgcaggggcggtagttccgcaggctatctctgcaccatggctcaggcgagagaaaatgtcagtttattcttcaagctatactgcttggcagtgatgactctggtggctgcagcttataccgtagctttaagatacacaaggacaacagctaaagaactctacttttcaaccacagccgtgtgtgtcacagaagttataaagttactgataagtgttggacttttagctaaagaaactggaagtttgggtagatttaaggcatctttaagtgaaaacgtnnnnnnnnnnnnnnnggaactgatgaagttaagtgtgccatcactggtgtatgctgttcagaataacatggctttcctagctcttagtaatttggatgcagcagtataccaggttacctatcaactgaagattccctgtactgctttatgtaccgttttaatgttaaatcgaacactcagcaaattacagtgggtttcagtttttatgctgtgtggtggggtcatacttgtacaatggaaaccagcacaagctacaaaagttgtggtagagcagagtccattattaggctttggtgcaatagctattgctgtattgtgctctggatttgcaggagtttattttgaaaaagttttaaagagttcagatacttccctttgggtgagaaacattcaaatgtatctgtcagggatcgtggtgacgttagttggtacctacttatcagatggagctgaaataaaagaaaaaggatttttctatggttacacgtattatgtctggtttgtcatcttccttgctagtgttggaggcctctacacttctgttgtggtcaagtacacagacaacatcatgaaaggcttctcagcagctgcagccattgttctttctaccattgcttcagtgatgctgtttggattacagataacactttcctttgcaatgggagctcttcttgtatgcatttccatatatctctatgggttacccaggcaagacactacctgcattcaacaagaagcaacttcaaaagaaagagtcattggtgtgtgattggaatcttaagatactcctataacgactaaactgtcaataataaattagagccttaagtcaaccccagatggtagcttaaacaatatcaacaaaattactgtatggcattaaggtacagagaactgtatgagtgaatgcttaacagatttatttagagtgtttggtatcaagctgtattatttcagaatgaaggactttactacagagagagagtgtgtgtgcatgtgtgtatgtatactgtgtacacagagcatggagtttacatggtatcaagaggcatgcacagaggagacaacacagggttacaacatcaggtgaaactacaatattcaatcaaggtttaagatttggtatctgaaggttcaagtgccaaagccatttctgtcacactgttctctcgttcaggtaccaggaggggaagcttagccttccttgttgtccagttcatggatagtactttgtccctgtagtagcaaaaaatctagctgcttttatcaaagtgaagaatgaataagataagacagttcagaacaaaaccagtgtgtaacttctaaaacagaacctatttcatggctcagacactgacttctgtcgtttgaatnnnnnnnnnnnnnnnnnnnnnnnnnnnnnnnnnnnnnnnnnnnnnnnnnnnnnnnnnnnnnnagctgatatacttttcagaaaattttctaagtcgcttttatactttcttttttataaagtatggttacctgttgggctctcaatttgtgaactttaagtgatttaaaatatttctataatgttaacggggaaatccagcaataaatttatttatannnnnnnnnnnnnnnnnnnnn

SEQ ID NO: 3398 - DNA, 1744 bp, Cricetulus griseus
  misc_feature (975)..(997): n is a, c, g, or t
  misc_feature (1723)..(1744): n is a, c, g, or t
tgtggctgggcgctctgacgtgagaggacatccggtctcgcttccactgtccgcggcccgtttcggcgtctcgggcgggtctccctggttctagcccgcgggtcggactcgcctctgcgtcttccaccactgcgaaagagggggaaatgccgaagaagaagacaggcccgaggaagaaggcagagaaccgccgagagcgggagaaacagctcagagcatcgagaagcactgtagacttagccaagcacccgtgcaatgcttcaatggaatgtgacaagtgccagaggcggcagaagaatagagcattttgctatttttgtaattctgttcagaagttaccaatttgtgcccagtgtggaaaaacaaagtgcatgatgaagtcttcagactgtgtcatcaagcatgctggtgtatacagtactggccttgctatggtgggtgcaatatgtgacttctgtgaagcttgggtttgccatgggaggaagtgtcttagtacccatgcctgtgcctgcccactcactgatgcagagtgtgtggaatgtgagcgaggggtttgggaccatgggggcagaatattcagctgttcattttgccataattttctttgtgaagatgatcagtttgagcatcaagccagctgccaagttttagaagcagaaacatttaaatgtgtttcctgcaaccgccttggccagcattcatgtctgcggtgtaaggcttgtttctgtgatgaacatacaaggagcaaggtgtttaaacaagaaaaagggaaacaacctccttgcccaaaatgtggacatgaaactcaggagacaaaggatctcagcatgtcaactcgctccttgaaatttggcaggcagactggaggtgaagagggagatggagcctctgggtatgatgcttactggaagaacctgtcatctgacgagtatgctgatactgggtaccatgatgatgaagaggaggatgaagcannnnnnnnnnnnnnnnnnnnnnntgggaaggattcagatgctgagtcatcagatctgttcactagtttgaacttaggaaggacctatgccagtggctatgctcactatgaggagcaggagaactaggagcagctcccgctggcacttgaagaagagcaggctgaatcatgaggatgctcagacgtcccctcccttggccttgtccaaaaggctagtcatactagggtacattctggcggtttgtaggaactgatactggacttctagtgtaaggaaaatgggttaaatgtaatggagtatcatgaattggattattactgatttcaatcatctggtaggttttgtcagttagatacatataaaatacatgataaaggaatagaaaggaaatatatttatttgaaattaaattgctgtttttattaaaagcactgcttataacttgcatgtatctgattttacaaagagtaacgggtaaaattactgtattcttttatttcaatccatacaatgatagtcatgttatattctgaattttcactgactatttatgctgtcttaagtagtcgtatctgtgttaagtggttgacgtgttcatctttttcttacaatgtatgtcctcaccagtgcttgttaatgcctcactgactgacagaaatctagctgttttcatacacataatgccaggactagtattgctgatgcttcacccagagaacttcacttttaaaataaatctactataaacnnnnnnnnnnnnnnnnnnnnnn

SEQ ID NO: 3399 - DNA, 2142 bp, Cricetulus griseus
  misc_feature (2081)..(2098): n is a, c, g, or t
  misc_feature (2117)..(2142): n is a, c, g, or t
gctttgcggttccaacatggcggacgtgacggtggaggttcgtggctccaacggggctttctacaagggatttatcaaagatgtccatgaagactccctcacagttgtttttgaaaataattggcaaccggagcgccaggttccgtttaatgaagttcgattaccaccaccacctgatataaaaaaagaaattagtgaaggagatgaagtagaggtatattcgagagcaaatgaccaagagccatgtggatggtggctagctaaagttcggatgatgaaaggagagttttatgtcattgaatatgctgcttgtgatgccacttacaatgaaatagtcacatttgaacgacttcggcctgtcaatcaaaataaaactgtcaaaaaaaacaccttctttaagtgcacagtggatgttcctgaggatttgagagaggcgtgtgctaatgaaaatgcccataaagattttaagaaggcagtaggagcatgcagaattttttatcatcctgaaactacccagctaatgatactgtcggccagtgaagcaaccgtgaagcgagtaaatatcttaagtgatatgcatctacgaagtattcggacgaagttgatgcttatgtccagaaatgaagaggccactaagcatttagaatgcacaaaacaactcgcagcagcttttcatgaagaatttgttgtgagagaagatttaatgggcctagcaataggaacacatggtagtaacatacaacaagctaggaaggttcctggagtaactgctattgagttagatgaagatactggaacatttagaatctatggagagagtgctgaggctgtaaaaaaagctaggggtttcatggaatttgtggaggattttattcaagttcccaggaatcttgttggaaaagttattgggaaaaatggcaaagttattcaagaaatagtggataaatctggtgtggttcgagtaagaattgaaggagacaatgaaaataaactacctagagaagatggaatggttccatttgtgtttgttggcactaaagaaagtattggaaatgtacaagttcttctagaatatcacattgcttacttaaaggaagtggaacaactgagaatggaacgcctgcagattgatgaacagctgcgacagattggttctaggtcttatagtggaagaggcagaggtcgtcggggccctaattacacctccggttatggtacaaattctgagctgtctaacccctccgaaacagaatctgagcgaaaagatgagctgagtgattggtcattagcaggagaagatgatcgagagactcgacatcagcgagacagcaggagacgcccaggaggaagaggcagaagtgtttctgggggtcgaggtcgtggtggaccacgtggtggcaaatcctccatcagttctgtgctcaaagatccagacagcaatccatacagcttacttgataatacagaatcagatcagactgcagacactgacgccagcgaatctcatcacagtactaaccgtcgtaggcggtctcgtagacggaggactgatgaagatgctgttctgatggatggaatgactgaatctgatactgcctcagttaatgaaaatgggctagtcacagttgcagattatatttctagagctgagtctcagagcagacaaagaaacctcccaagggaaactttggctaaaaacaagaaagaaatggcaaaagatgtgattgaagagcatggtccttcagaaaaggcaataaatggtccaactagcgcttctggcgatgaaattcctaacgtaccgcgtactccaggagaagaaaagactaagaacttaaaagaagaaagcactcaagaagcagcagtcctgaatggtgtttcataactgaaggaagttcctagtttacagttcttttacattacagttacaatagtgcttgtacaagcttgccaaagatagaatatggatcgccagtctttacatcgcactttcagttcctccatttggaattcagaaaggggagggatcctgaagaaatcatatgttaaacatactttgacacctactgtgttaaaaatatatnnnnnnnnnnnnnnnnnnaatagtatatgtaacattnnnnnnnnnnnnnnnnnnnnnnnnnn

SEQ ID NO: 3400 - DNA, 1491 bp, Mesocricetus auratus
ctggaaatgctctttacaaggctactctgtggaggaacagctaaagaactctctctacagtgatggctacatccatctctgtgctggggtcaggccagagacacagaagtgagccaagtctacagttagaactgagctaatggacaggacagttcaagaacaacaaaaaagcatcctcatggcccaccactgggaagcaggcaaaccgaaatgctcacagcttaaatccctcctattgtatccttagatgcaaacagctctggggaaggtagaaccttaagcaaggcaacctctgtagcaggggcagaccctgcagttactggaagctgaaggctctcagatgaccacatccctcacagccactagacagaaagatcatgagcgggccctttaaactcctctccaggtcttccccaattcccagccccaccactccatagtaggtaccaggcatctattgactgggtggatggatgaacatttgagatgatctggaagtctgaataggatttgtggaaatgggaaatggctgggagggatgcaagctgggaagctgagacagaaggtgttggttgcaaccaaagtgaggttacatgctaagacacaagagcactagagagtaaacacagagcatgggaagctaaagttagagcctgggaactactaacacttgagaactgtcaacatctagaaagaatagccaaggaagggaaacaggaaaatgcagagtgtgggaaagaatggagcaggagagaggaggctatagcataaaggctagggagaggtcaagtcagataaacactgaagtgcccctcaactggccattagaaggacaggactgggtaagaacagaccaagcctgacctgggcctgggtctctgatatatactatggagaagtcttcatttgttcatgtctaatgcagaatctaacctgaccaatgacacccaagaatcaagtgacctagccactttccttggaggggggcagtagaaggagctcagtgacattttagagtccttggtctttgtctaccttgtattcctgaggagccaccaccctctggtttgccaaagttggcaagtctacagttgcttcctggaacctggagtacccagtgcttgacttcaaaaagaggacacagatgtccagattcccacaacctctgacttgggctcccccccactgcctggacaccccaaaagtggcctgttgttgagctcagtttcaatgggaacagaaactgggtttaaggaaagagattatttacttattccacagagaagataaccaagtaaatagtgcaatatcctaagtggtacccaagccctgcctactacctcttgtgggcttcctagaacatataaaaagccacctgatgcccccacacttatacacactactataccaccccacatccagagacagccaagcctcccagactccaccatgaagattgccatcacaatggctgttgtcatgctgtcggtc

SEQ ID NO: 3401 - DNA, 2056 bp, Cricetulus griseus
  misc_feature (1327)..(1345): n is a, c, g, or t
  misc_feature (2036)..(2056): n is a, c, g, or t
aattcggcacgaggcaacttggtggaggagaagtccagcatgatccgcaagtccttggagatgctggagctcggcctgagtgaggcgcaggtgatgatggccctgtccaatcacctgaatgccgtggagtcggagaaacagaaactgcgcgctcaggtccgccgtctgtgccaggagaaccagtggcttcgggatgaactggccaacacgcagcagaagttgcagaagagtgaccagtccgtggctcagctggaggaagagaagaagcacctggagttcatgaaccagctgaagaaatatgacgatgacatctctccctcggaggacaaagactctgattctaccaaagagccattggatgacctcttcccaaatgacgaggatgacccagaaccaggaatccagcagcaacacagcagcgctgcggccgccgcccagcaggggggctacgagatcccggcacgcctgcgcacgctccacaacctggtgatccagtatgcttcacaggggcgttacgaggtggcggtgcccctctgcaagcaggccctggaggacctggagaagacttccggccatgaccaccctgatgtggccaccatgctgaacatcctggccctggtgtacagggatcagaacaagtacaaagatgcagccaatctgctgaacgacgccctggctatccgtgagaaaaccctgggccgagatcaccccgcggtggcagcaactctcaacaacctcgcagtactgtatggtaaacgagggaagtacaaggaggcggaccggctgtgtaaacgagccttggagattagagagaaggttctgggaaaggatcatccggatgtagccaagcagttaaataacttggccttactgtgccagaaccagggcaagtatgaggaggtggagtattactaccagagggccctggagatttaccagacaaagctaggacccgatgatcccaatgtggccaagacgaagaataacctggcctcctgttatctgaaacaagggaagttcaaacaagcagaaacgctgtacaaggagatcctcacccgtgcacacgaacgggagtttggttctgtggatgatgaaaacaagcccatttggatgcacgcggaagagagagaagagtgcaaaggaaagcagagggacgggacttcttttggagagtacggtggctggtacaaagcctgcaaagtggatagtcctactgtcacaaccactttgaaaaaccttggagcactttaccgacggcaggggaaatttgaagctgcagagacattggaagaagctgccatgaggtcacgtaaacagagagtggctnnnnnnnnnnnnnnnnnnnagaacatgcagaagcggaggagccgggagagtctccactcggacgtggtcaagtacgagagtggccctgacggcggggaggaagtgagtatgagcgtagagtggaacggggatggcactggatctttaaagcgcagtggctcctttagcaaactccgggcttccattagacgcagcagtgagaagctggttaggaagctgaagggaggaagtgcacgggacagtgagccgaggaaccctggggcgtccccagcagagcctctttgtgtggaaaacgtacagcagcagcctagaagacgctagcactaactgacctgagcctggcctgctctaaacaccatgatgctgctgagtatggctccagagctggccctgtgaaggccatggtggggctgggagggcctgcggctgggagcccagtgctaacttagtccccctgccctcgtgctgcgcgaccactactaataaccactaccactaggagggttttggagagcagctctcacgcagtaaggtggtgacctgcccctgtccttcctgggaggccccgggacaggacacatcggctcctgctgcttctgcctggccgtcctgtggcactcctcatgtgtttagttctctgtgttgtgtgtgataatgtattttattgttacatttttaaattaaaagttatatgccttttacgtttaccnnnnnnnnnnnnnnnnnnnnn

SEQ ID NO: 3402 - DNA, 1710 bp, Cricetulus griseus
  misc_feature (1235)..(1264): n is a, c, g, or t
  misc_feature (1688)..(1710): n is a, c, g, or t
aagaagaaggacattttttttaaacaaggaccaccctttactgaaattaccatggttgacacagagatgccattctggcccaccaacttcggaatcagctctgtggacctctctatgatggatgaccactcccattcctttgacatcaagccctttaccacagttgatttctccagcatttctgctccacactatgaagacattccattcacaagagctgacccaatggttgctgattataaatatgacctgaagctccaagaataccaaagtgcgatcaaagtagaacctgcatccccaccttattattctgaaaaggcccagctctacaacaggcctcatgaagagccttccaactctctcatggccattgagtgccgagtctgtggggacaaagcatcaggcttccactatggagttcatgcttgcgaaggatgcaagggttttttccgaagaactatccgattgaagcttatttatgataggtgtgaccttaactgccggatccacaaaaaaagtagaaataaatgtcagtactgtcggtttcagaagtgcctcgctgtggggatgtctcacaatgccatcaggtttgggcggatgccacaggccgagaaggagaagctgttggcggagatctccagtgatatcgaccagctgaacccagagtctgctgatctccgggccctggcgaagcatttgtatgactcatacataaagtccttcccgctgaccaaagccaaggcgagggcgatcttgacaggaaagacaacagacaaatcaccttttgtcatctacgacatgaattccttaatgatgggagaagataaaatcaagttcaaacacatcacccctttgcaggagcagagtaaagaggtggccatccgcattttccaagggtgtcagtttcgatctgtggaagctgttcaagagatcacagaatacgctaaaaatatccctggattcattaaccttgacttgaacgaccaagtgactcttctcaagtatggtgtccatgaaatcatctatacgatgctggcctccctgatgaataaagatggagttctcatatcagagggccaaggattcatgaccagggagttcctcaaaagcctgcggaagccctttggtgactttatggagcccaagtttgagtttgctgtgaagttcaatgcactggaattagatgacagtgacttggccatatttatagctgtcattattctcagtggagaccnnnnnnnnnnnnnnnnnnnnnnnnnnnnnnaggacattcaagacaacctgctgcaggccctggagctccagctcaagctgaaccacccagagtcctcacagctgttcgccaaggtgctccagaagatgacagacctcaggcagatcgtcacagaacatgtgcagctattgcatgtgatcaagaagacggagacggacatgagccttcaccccctgctccaggagatctacaaggatctatattagcataaaaaaaccctcccccccaccccccggctgacgtgctccctctttcaattgcactattactctggaggggaaaatctgacaattaagaaatttactgtgaaaaagcattttaaaaacaaaaggttttagaacatgatctattttatgcatattgtttataaagatacatttacaatttacttttaatattaaaaattaccacattnnnnnnnnnnnnnnnnnnnnnnn

SEQ ID NO: 3403 - DNA, 274 bp, Mesocricetus auratus
  misc_feature (3)..(3): n is a, c, g, or t
  misc_feature (17)..(18): n is a, c, g, or t
  misc_feature (73)..(73): n is a, c, g, or t
  misc_feature (106)..(106): n is a, c, g, or t
  misc_feature (127)..(127): n is a, c, g, or t
  misc_feature (142)..(142): n is a, c, g, or t
  misc_feature (148)..(149): n is a, c, g, or t
  misc_feature (210)..(210): n is a, c, g, or t
  misc_feature (216)..(216): n is a, c, g, or t
  misc_feature (257)..(257): n is a, c, g, or t
  misc_feature (259)..(259): n is a, c, g, or t
  misc_feature (265)..(266): n is a, c, g, or t
ctnctcccaggtccccnncctgaggtctagaggaagggcctccgctgtacacataacacatggcctggctaancccattggttgcataaaactgtctgtgttagtncaggcacgggtgtcctaggtncttcacaaccctgtncactgnncagcagggtacaggctggcaggaatattcagttagctctctttataatttgaattctcttncttttngagtactttctgttaatctctccccaacaattactgacctncnttctanngatcactt

SEQ ID NO: 3404 - DNA, 3257 bp, Cricetulus griseus
  misc_feature (1066)..(1086): n is a, c, g, or t
  misc_feature (2121)..(2140): n is a, c, g, or t
tggcggaggccgacggacgggaccggccatgtcggtggtgggactagacgtgggctcgcagagctgctacatcgcggtggcgcgggccgggggcatcgagaccatcgccaacgagttcagcgaccgctgcaccccatcagtcatatcatttggaccaaaaaacagaacaattggagttgcagccaaaaatcagcaaatcactcatgcaaacaacacagtgtctagctttaagaggttccatggcagagcattcagtgaccccttcattcaaaaggaaaaggaaagcctgagctatgatttggtccccatgaagaatggtggcgttgggataaaggtcatgtacatggatgaagagcatctctttagcgtggagcagataacagccatgttgctgactaagttaaaggaaactgcagaaaacaacctcaagaagccagtaacagattgtgtcatttcagtcccctccttcttcactgatgccgagaggaggtctgtcctggatgctgcacagatcgtgggcttgaactgtttgcggctcatgaatgacatgacagctgtggctttgaattacggaatttataagcaggacctcccaaatgcagatgagaagcctcagggtagtggtgtttgtggacatgggccatcctctttccaagtgtctgcctgtgcttttaacaaaggaaaactcaaggttctgggcacagcatttgatcccttcttaggaggaaagaactttgatgagaagctggtggagcatttttgtgctgagtttaagaccaagtacaagttagatgcaaaatccaaaatccgagcactccttcgcctccatcaggagtgtgagaagttgaaaaagctcatgagctctaacagcacagacctgccactcaacatcgaatgcttcatgaatgacaaagatgtctctgcaaagatgaacaggtcacagtttgaagaactgtgtgctgaactcctgcagaaaatcgaggtccccctccattcattgatggaacaaactcacctcaagaccgaggatgtgagtgccattgagattgttggaggtgctacaagnnnnnnnnnnnnnnnnnnnnnaattgccaaattctttggaaaagatgtcagcaccacactcaatgcggatgaagccgtggctagaggatgtgcattgcagtgtgcaattctgtctccggcatttaaagttagagagttctctgtcaccgatgcagttcctttcccaatttctctggtctggaaccacgactcagaagaaaccgaaggtgttcatgaggtgttcagtcggaaccatgctgcacctttctccaaagttctcaccttcttgagaagggggccttttgagctggaagcgttctattcggaccctcaaggagttccttatccagaagcaaaaataggccgttttgtcgttcagaatgtttctgcacagaaagatggagaaaagtctaaagtgaaagtcaaggtgcgtgtgaacacacatggcattttcaccatctccacggcatccatggtggaaaaagtcccaacagaggaagacgacgggtcttctgtcgaggcagacatggagtgtccaaatcagaagccagcagaaagctcagatgtagataaaaatagccagcaagacaacagtgaagctggaacccagccccaggtacaaaccgatggtcaacaaacctcacagtctcccccttcacctgaacttccctcagaagaaaacaaaatcccagatgctgacaaagcaaatgaaaagaaagttgatcagcctccagaagccaaaaaacctaaaataaaagtggtaaacgttgaactgcctgtagaagccaatttggtctggcagttagggagagaccttcttaacatgtacattgagactgagggaaaaatgataatgcaggacaaactggagaaggagagaaacgacgctaaaaacgcagtggaagagtgtgtatatgagttcagggacaagctgtgtggaccatatgagaaattcatatgccaacaggaacatgaaaagttcctgaggcttcttacagagacagaagactggctgtatgaggaaggagaggaccaggctaagcaagcatatatcgacaagttggaagagttgatgannnnnnnnnnnnnnnnnnnngttcgatttcaagaagccgaggaacggccgaaagtattggaggagctggggcagcggctgcagcactatgccaagattgcagcagacttcagaagcaaggatgagaaatacaaccacattgatgaatcagaaatgaagaaggttgagaagtctgttaatgaggtgatggagtggatgaataatgtcatgaacgctcaggctaaaaggagtcttgaccaggaccctgttgtgcgcactcatgaaatacgagcgaaggtcaaggaattgaacaatgtttgcgaaccagttgtaaatcaacccaaaccaaaaattgagtcacctaaactggagagaactccaaatggtccaaatcttgacaagaaagaagatttagaaggcaaagataattttggtgctgaagctccacatcagaacggtgaatgccaccctaacgaaaagggctctgtcaatatggacctggactaggcgctgctggcttcctcctccagttcatgaaatgtgtttgccatagtatgtgattctgtacaacagactttgtcgtctatttatattttcttttcttttttttaaaagactgtctataaattttgtgtattatatgggaaaaaaggaaaagcctgagtctgtagtctttgaccctaaggagaatagccttggtgacagagtcgtgtggctgtgtgacccacactgagtactctacagtattgccacttggactgctgaggagtttgagtttgtcttttgaggagacaactcatcttgcttgttcaaatgctctgtgatgagacttttggagcagttgttctcctgcaaggctgtttcttttgcattttgctctccatttccgcatgtgtgtggctgtgggtgtttataatgagactaagtctgatttgcataagggctttcaaaaattaagtctgtcccgtagattttgctttcattattacaaattcaacgagtacaacacagctaatgaattgtagcagcatgcaaagcaaggctgtaactatcaccatacagtgcactgtcccgtgagtgtgacacgggcaaatatatgaatcatgtgaccattgtgactgccccatgagctttaaaataaagttcacccagtggtgtc

SEQ ID NO: 3405 - DNA, 440 bp, Mesocricetus auratus
gctcatcctttgctaagtctgaaaacaaactgagcaccatgaagctgtccctgtgtcttctgttggtcatcctggctgttcattgctatgaagctaatgctgcaaacgtctgtccagcagttctttctgtaagcaaatctttcctatttgacaaggtggagaaatttgaggcctatcttcagacatttaacgcacctccagaggctgttaaagcaaaagtggaagtgaagaaatgtatagacagcactctgaactatttagagaaaatggaaatgggaaaaatactggcagaagtcgttgggtattgtaaaggaacagaaaactgaaacatggctcttcctggtctccattgcttctcacagataaactgactttccttgcccaatgtgaaggtttcaacgtcttgcactaataaattactctccttgcatgttaaaaaa

SEQ ID NO: 3406 - DNA, 4454 bp, Cricetulus griseus
  misc_feature (1061)..(1080): n is a, c, g, or t
  misc_feature (2407)..(2434): n is a, c, g, or t
  misc_feature (3553)..(3569): n is a, c, g, or t
  misc_feature (3804)..(3845): n is a, c, g, or t
aaaaactgcagccacatacagccctgggaaactgattgtctgtcgtgcttgccagaaagacaatgtgaatatgatccaaagggtcccaaagtttcagatggaaaagaagaagtcttagtctcagcatgtcatcctgcaggacagcacacagcagcagcacagcccagcagcattagctttgaattacaggaagaccctgtcaatggccacaatagtacaagtcctaaagaaactcctagcttgaaggtgcttctgtcaaagccagttgtgctttctagaggaaaagtgtcatgtaaaatgccagagaaactgcagtgtgagagttataaagataatactgaattaagcaaaagcattcccttgggaggaaataaaatacacatcctaagtgaaaattctaaacctcctgagcttctgccacctggaaaatatgtaacagaagcatcccccacagtgaagtctcagttcaatcagaatacaaatctagcagtcaaaaaaaatgaccaagaagaaacgccttttatttcagaagtaacagtcaatgtgagttctggagaacttttcccagacaatgagaataatttcgcctttcaagtaactcatgaaaataataagactgccttaggaagtactgtggaactgcaggaagaagacctccgccatgctaaagggcctaatctcaacaactctcccacagcagtagatggagacataggtgatgagcaagcagctcatgcactgattatggaagactccgattcctcagctttagtccatgagtgtgcaaagaagagcagaaatactatagagcagcatctgaaaggaaccacagacaaagatttcaattcttccttggatgtgaaatcagatgggaacaatgactatacagacaaatggccaggatttttggatccagtttttaagcataaatttggaggtagcttcagaacagcttccaataaagaaataaaactttcagaacataatgttaagaaaagcaaaatgttcttcaaagatattgaagaggagtatcctactagtttaacctgtattgacatagnnnnnnnnnnnnnnnnnnnnaaccaggagatactaagtggaccttatacatttgatttgcagtcagtcactaccatgtctgcccatccacagagtcaggcatctgtttcttgtgaagatactcacacatcacttcaggtgttaccttcaaagcaagattttcattcgaatcacaatttaacacccagccaaaaggcagaaattacagaactttctactatcttggaagaatcaggaagtcagtttgaattcacacagttcaaaaagccaagccatgtagcacagaataatatacctgaagtgcctggaaaacagacggttgccataaatactacttctgaggggtggaaaaggattggtcttcatctcacagtggatcctgcctctgtagctcagacagatgacagcaagaaatttgaaggttctgctggatttagacaaagctttccttgcctgttgaaaagcagttgtaacaaaaatacatctagttttttagcaaatgtaaatgaaatggagtttcgaggatttcgttctgctcttggcacaaagcttagtgtgtctagtgaggctctgcaaaaagctgtgaaactcttcagtgacattgaaagtggtagtgaggagacttccacaaaagtcgacccaagagctttgtcttcaggtgctcgtcatgattctggtgcttctgtgtttaagataaggaaacaaaacagtggtaaaagttttgatgagaaaactagtaagtgccaagtaacattacagaataataccgaagtgactactggtatttttgttgacagaaatcctgaaaattatgcaagaaatacaaaatgtgaagataacaactctactggttttcaaagaagtccttataaattaaaaaactcggaggatagtgaatcaagtacaagcggcacagtttctgttcatcaagatgatggtgacttaccatgtgctgctgatcactgcagcaagtaccctgagtcgtgttcccaatatgtaagggaggaaaacacacaaattaaggaatgtgtatcagatttaacatgtttggaagtcatgaaagctgaggaaacatgctatattcaaccttcagataaagaacaattaccttcaggtaagatggaacaaaatagaaaagattttaatatatcctttcagactgcaagtgggaaaaatgtcagagtctctgaggagtcattaagtaaaagtatgaatattttaaatcaagtaacagatgaatcgatcatctcttcagattctttgaattctaaatttcattgtggcacaaataacaacaagatgggtatttcacatcacaaggaaactaccagtactaaaaaggtatttnnnnnnnnnnnnnnnnnnnnnnnnnnnngtcaattaccaactctccagcagcatcctagatgtgaaatagaaagtatcaaagaacctgctctgttgggttttcataccgctagtggaaaaaaagtcaaaattatgcagaaatctttagacaaagtgaaaaacctttttgatgagacacagtatgttagtcatcaagggtcaaaacccttgaaggacagagagaactgcaaagaaggacttgcattagatgtgagacaattgaaatacctgcctccaagtgttgaagaaatgcagaagagctttctctctaaggagtctgaagtgctatctaagcaaagtgatcgtttgtataggtcgactgaaaatctcagaacatcaaatggtacctcttctaaagctaatgtacatggaaacatagaaagtgaaatagaaaaaagtcctacaacttgctgcattagtcatttatcttattcagtcactgaagattctgctttgacatgtgacacaggacacggtagaaaaacttgtgtcagtgagtcttctctatccaaagacagaaaatggcttagagacgggactggtgataagcttcaaaaaagagatgctgccgaaattgaatgtgtaaaagaacatactgagggttatgctggagatgcttcatgtgagcatagtttagacagtatcagaaatgaagttgatataaattgtgtctctgaaaatcaaacttcagccttctttagtgaccctagcatgtgtcatagctgtccatcccattttggttgtcattgtgataacaagcataatgactcaggatatttctcaaaaaataaaatttattctgatactcagccagacacgaagaatgaagacactgccaatttttccagtgtatatgctacaaaagaagtaaatatatacccgccaactgtaaatgaagatatttgtgttcagaaacttgagactaactcttcaccacatacaaataaaaatgtagccattgacttggctatagcagattcaaggaattgtaaggtatgcccatccaagttcattacagatcactcacaagaaactgtgaaaacagtaaaagcaatatttacacataacagtgataaaacaattaagcaaaacacaaagagtaaaccannnnnnnnnnnnnnnnnctgtcagaaagcattggataattcagaggattttatatgtctagctcttagagatgactatatgaactcacataagattctgtttataacccacgatgaacaaatattacagcataacctaagtgtgtctggactggagaaagctcaaataccacctgttcacttggaaacttgggataagtgtaaatctacaagggaacttgcacaggcagcctgttcttcacacatgccgggnnnnnnnnnnnnnnnnnnnnnnnnnnnnnnnnnnnnnnnnnncgcttcattagaaaaggcaaggcaagtgttttctgagatggatggtggtgctaaacagttactttccacattgtctctggaaagtcatgaacaatcagaccattctgggagaagagaaaactctgtgacacataaccctgaggatgtattgtcactcccaaaaacctttgcaagcaatgccaattcatctgtattctctggatttagtacagcaggtggtaaacgggtcacagtttcagaaagtgccttacacaaagttaagggaatgttagaggaatttgatttgatcggaactgaacatactctccagtgtccacctacatctgaaggtgtatcaaaaatacttcctcaatattgtgttgaaaagagaaccccagaataccctataaactctaaattgcagaaaacctatgatgataaattcagtttaccaaacaactataaagaaagtgcttctttggggaatactcattctcttgaagcttctccccaactctctcagtttaagcaagacacacggttggtattaggaaccaaagtatcccttctggaaaaagaacaaaccttccctcaaaatataaaaacagaaagtggtgtaatggaaactag

SEQ ID NO: 3407 - DNA, 211 bp, Mesocricetus auratus
agcacatcttcccagcctgagttccagagcctgcagatcgcctgggaactgcacaaagctcccaatcccggcgaagcaagcatcccagattccagatcttctctcccaccaaagagaccaggaaactacaggaaccagggagaccaggggattagctgttcccaggatcaggtaccaatcattgacccagtaattaaggggtttccaatgg

SEQ ID NO: 3408 - DNA, 159 bp, Mesocricetus auratus
agtgtgtgtatgacgtgaattaaaggtatttggtagacataaaaatgaaagttgactggacctgtgcctgcagcagcacaatgcaggcatgtagctagtattcggaaccgctaagaagtctgtgccccatgatctctgggttctcgagttccatgctgg

SEQ ID NO: 3409 - DNA, 239 bp, Mesocricetus auratus
  misc_feature (120)..(122): n is a, c, g, or t
ggttctatatgtatatattttggagttcagccctctgtcagacgtggggttgacaaggaaattttctcattctgtagtagccctttcatattgttgacagcattgtttgctaatggaaannngcccatttcttagttggtgcttttgctgtctgtgtccgaggtgttctactcagtaagttgattactgtgccatgacattcaaggctaattatcaccagcgctgctagcaggttcata

SEQ ID NO: 3410 - DNA, 99 bp, Mesocricetus auratus
  misc_feature (47)..(47): n is a, c, g, or t
  misc_feature (52)..(54): n is a, c, g, or t
aatctaacacgttactattttggggttcagtgtgggcctctatttanaaaannnaaaatgatgtatatgtggcgcaatcttacacagcaatacacactt

SEQ ID NO: 3411 - DNA, 189 bp, Mesocricetus auratus
ttttgagaaactctcctttgtaaaaaccccttgttcagacaacagcaaacatcttataatgtgcttaaacagttgaaccttttgcatatacaaagttttaatcaccttaggtaaagctcaaagccaggtatttaaactatgtgtgctgtccacatttaatttataacatatgcaaagctcataaatgcc

SEQ ID NO: 3412 - DNA, 148 bp, Mesocricetus auratus
  misc_feature (72)..(73): n is a, c, g, or t
  misc_feature (85)..(88): n is a, c, g, or t
  misc_feature (98)..(100): n is a, c, g, or t
  misc_feature (103)..(103): n is a, c, g, or t
  misc_feature (108)..(109): n is a, c, g, or t
  misc_feature (130)..(131): n is a, c, g, or t
gatctgtgattagtctgggggtgtcgggagtgatggggagaactcttgggggaaggtgcatgactaccgcannctcatcattccnnnncttctctccnnnccnccacnngcttagagccgtcggattttnnttgagatcagaccaggg

SEQ ID NO: 3413 - DNA, 98 bp, Mesocricetus auratus
ggtgttaattgccagtattacactgaagtatgtcccttgtttccctagtctctctaggacttcagcatgaagtgctgttgtttcttgtcaatggtctt

SEQ ID NO: 3414 - DNA, 148 bp, Mesocricetus auratus
  misc_feature (5)..(7): n is a, c, g, or t
  misc_feature (35)..(35): n is a, c, g, or t
  misc_feature (40)..(40): n is a, c, g, or t
  misc_feature (71)..(71): n is a, c, g, or t
  misc_feature (89)..(89): n is a, c, g, or t
tcttnnnggccataatgtactcactataggcgaantcganctcggtaccaagaccattgacaagaaacaanagcacttcatgctgaagncctagagagactagggaaacaagggacatacttcagtgtaatactggcaattaactccg

SEQ ID NO: 3415 - DNA, 100 bp, Mesocricetus auratus
tgacatcactatagtgcaatatgacatcacaattatacactgtgttatctatatactgcagtgtgacaattattgactgtaatatagctatagtgctcta

SEQ ID NO: 3416 - DNA, 179 bp, Mesocricetus auratus
atccaagatccaagagcactccacctcagcctccatccctaaatctgagtgtactaaaactctttcacacaaatttttctgcattctttgcatcagaagactgctgcaagaacattgcttataaattggggacaaatttgaataccattgaggaagttctgagattgaggaaacgtgaa

SEQ ID NO: 3417 - DNA, 230 bp, Mesocricetus auratus
cctgatgtagagaatgctgtattgagatgctctagatagttgcaactgggcatcacaagagatgtcacatattactttgtatatgaggacttcaaggttataccagctattcctttctcattggttggtaggatgattatagtcagagtcaccaccagcaattgctaacgggcggatattaggggtaataatgtttaccgttaagactttaatggtatccatggtcattt

SEQ ID NO: 3418 - DNA, 123 bp, Mesocricetus auratus
  misc_feature (115)..(117): n is a, c, g, or t
gccagtgttgtttctcaattatgcttcactttatttttgagtcattgtctcattgaatatggaggttcctgtttcagatagatgagctggccaagaagccttaacaaccctcctnnntccctt

SEQ ID NO: 3419 - DNA, 143 bp, Mesocricetus auratus
gagaggagggagggaaggctgtggtcggtgatgccccaaatgaggttgtaacggtaaacgtcacatttactgaaagtaagtatttattgtagaaattactcacaagataccaaacaagtaacccagatgagcccagtagtttt

SEQ ID NO: 3420 - DNA, 638 bp, Mesocricetus auratus
cagcagctctcagccgccaccccgcacggcatcaacgacatcctgagtcggccctccatgccggtggcctcgggggccgccctcccttccgcctcgccctcggggtcgtcttcctcctcctcgtcgtccgcctccgccacctcggcctctgcggccgccgaaaagcacaagtcgagcagcggcggcctcctgctgcacgcgtccgaggccgagggctcgtcctgagcgccgcccgcccgcccgcccgcccgctgctgcgggatcccgggccgccccgaccgcgcccctcagccggtcacccccgggcccagcaccgcggctgctccccgggcctttactattttctaagatgtacatatctatttttttaacccagaaatcgtggcggggcctggggggataggacggcgcgttgacgagaaggaagggagcccgccgagtgcgccgcgttaaatgacgaacccgcatccccgcggctcccctggacccttcccacccgcggtgtcagtcaatccccacccccatccaggctcggtcccttgctctgtggtccctgagctccggggttcgtgtttgtgaagagtcgacagccagcgcctggtgggaatctccgagccacacagggcatctgccaccta

SEQ ID NO: 3421 - DNA, 2832 bp, Cricetulus griseus
  misc_feature (54)..(82): n is a, c, g, or t
  misc_feature (88)..(138): n is a, c, g, or t
  misc_feature (141)..(153): n is a, c, g, or t
  misc_feature (183)..(222): n is a, c, g, or t
  misc_feature (244)..(314): n is a, c, g, or t
  misc_feature (322)..(366): n is a, c, g, or t
  misc_feature (369)..(395): n is a, c, g, or t
  misc_feature (411)..(450): n is a, c, g, or t
  misc_feature (482)..(595): n is a, c, g, or t
  misc_feature (598)..(624): n is a, c, g, or t
  misc_feature (643)..(679): n is a, c, g, or t
  misc_feature (686)..(699): n is a, c, g, or t
  misc_feature (701)..(823): n is a, c, g, or t
  misc_feature (826)..(852): n is a, c, g, or t
  misc_feature (868)..(908): n is a, c, g, or t
  misc_feature (915)..(928): n is a, c, g, or t
  misc_feature (930)..(964): n is a, c, g, or t
  misc_feature (969)..(1045): n is a, c, g, or t
  misc_feature (1057)..(1083): n is a, c, g, or t
  misc_feature (1099)..(1138): n is a, c, g, or t
  misc_feature (1145)..(1158): n is a, c, g, or t
  misc_feature (1160)..(1197): n is a, c, g, or t
  misc_feature (1206)..(1282): n is a, c, g, or t
  misc_feature (1286)..(1312): n is a, c, g, or t
  misc_feature (1328)..(1367): n is a, c, g, or t
  misc_feature (1375)..(1388): n is a, c, g, or t
  misc_feature (1390)..(1512): n is a, c, g, or t
  misc_feature (1515)..(1542): n is a, c, g, or t
  misc_feature (1558)..(1598): n is a, c, g, or t
  misc_feature (1620)..(1687): n is a, c, g, or t
  misc_feature (1690)..(1743): n is a, c, g, or t
  misc_feature (1746)..(1770): n is a, c, g, or t
  misc_feature (1788)..(1828): n is a, c, g, or t
  misc_feature (1852)..(1920): n is a, c, g, or t
  misc_feature (1932)..(1972): n is a, c, g, or t
  misc_feature (1975)..(2002): n is a, c, g, or t
  misc_feature (2018)..(2058): n is a, c, g, or t
  misc_feature (2065)..(2078): n is a, c, g, or t
  misc_feature (2080)..(2202): n is a, c, g, or t
  misc_feature (2205)..(2231): n is a, c, g, or t
  misc_feature (2254)..(2282): n is a, c, g, or t
  misc_feature (2293)..(2306): n is a, c, g, or t
  misc_feature (2308)..(2431): n is a, c, g, or t
  misc_feature (2434)..(2460): n is a, c, g, or t
  misc_feature (2476)..(2516): n is a, c, g, or t
  misc_feature (2544)..(2626): n is a, c, g, or t
ccacgaatatttgtcattcctgacctgttttttgtttgtgtgtgtgacagacannnnnnnnnnnnnnnnnnnnnnnnnnnnngcaaannnnnnnnnnnnnnnnnnnnnnnnnnnnnnnnnnnnnnnnnnnnnnnnnnnaannnnnnnnnnnnngagggcatcccccctgaccagcagaggctnnnnnnnnnnnnnnnnnnnnnnnnnnnnnnnnnnnnnnnntccgactacaacatccagaagnnnnnnnnnnnnnnnnnnnnnnnnnnnnnnnnnnnnnnnnnnnnnnnnnnnnnnnnnnnnnnnnnnnnnnnaaccatcnnnnnnnnnnnnnnnnnnnnnnnnnnnnnnnnnnnnnnnnnnnnnaannnnnnnnnnnnnnnnnnnnnnnnnnntgaccagcagaggttnnnnnnnnnnnnnnnnnnnnnnnnnnnnnnnnnnnnnnnntccgactacaacatccagaaggagtccacccnnnnnnnnnnnnnnnnnnnnnnnnnnnnnnnnnnnnnnnnnnnnnnnnnnnnnnnnnnnnnnnnnnnnnnnnnnnnnnnnnnnnnnnnnnnnnnnnnnnnnnnnnnnnnnnnnnaannnnnnnnnnnnnnnnnnnnnnnnnnntgaccagcagaggttgatnnnnnnnnnnnnnnnnnnnnnnnnnnnnnnnnnnnnntccgacnnnnnnnnnnnnnngnnnnnnnnnnnnnnnnnnnnnnnnnnnnnnnnnnnnnnnnnnnnnnnnnnnnnnnnnnnnnnnnnnnnnnnnnnnnnnnnnnnnnnnnnnnnnnnnnnnnnnnnnnnnnnnnnnnnnnnnnnnaannnnnnnnnnnnnnnnnnnnnnnnnnntgaccagcagaggttnnnnnnnnnnnnnnnnnnnnnnnnnnnnnnnnnnnnnnnnntccgacnnnnnnnnnnnnnngnnnnnnnnnnnnnnnnnnnnnnnnnnnnnnnnnnngtggnnnnnnnnnnnnnnnnnnnnnnnnnnnnnnnnnnnnnnnnnnnnnnnnnnnnnnnnnnnnnnnnnnnnnnnnnnnnngtcaaggcaaannnnnnnnnnnnnnnnnnnnnnnnnnntgaccagcagaggttnnnnnnnnnnnnnnnnnnnnnnnnnnnnnnnnnnnnnnnntccgacnnnnnnnnnnnnnngnnnnnnnnnnnnnnnnnnnnnnnnnnnnnnnnnnnnnngatgcagannnnnnnnnnnnnnnnnnnnnnnnnnnnnnnnnnnnnnnnnnnnnnnnnnnnnnnnnnnnnnnnnnnnnnnnnnnnnaagnnnnnnnnnnnnnnnnnnnnnnnnnnntgaccagcagaggttnnnnnnnnnnnnnnnnnnnnnnnnnnnnnnnnnnnnnnnngtccgacnnnnnnnnnnnnnngnnnnnnnnnnnnnnnnnnnnnnnnnnnnnnnnnnnnnnnnnnnnnnnnnnnnnnnnnnnnnnnnnnnnnnnnnnnnnnnnnnnnnnnnnnnnnnnnnnnnnnnnnnnnnnnnnnnnnnnnnnnaannnnnnnnnnnnnnnnnnnnnnnnnnnntgaccagcagaggttnnnnnnnnnnnnnnnnnnnnnnnnnnnnnnnnnnnnnnnnntccgactacaacatccagaagnnnnnnnnnnnnnnnnnnnnnnnnnnnnnnnnnnnnnnnnnnnnnnnnnnnnnnnnnnnnnnnnnnnncannnnnnnnnnnnnnnnnnnnnnnnnnnnnnnnnnnnnnnnnnnnnnnnnnnnnnaannnnnnnnnnnnnnnnnnnnnnnnncctgaccagcagaggttnnnnnnnnnnnnnnnnnnnnnnnnnnnnnnnnnnnnnnnnntccgactacaacatccagaaggannnnnnnnnnnnnnnnnnnnnnnnnnnnnnnnnnnnnnnnnnnnnnnnnnnnnnnnnnnnnnnnnnnnnaaccatcacccnnnnnnnnnnnnnnnnnnnnnnnnnnnnnnnnnnnnnnnnnaannnnnnnnnnnnnnnnnnnnnnnnnnnntgaccagcagaggttnnnnnnnnnnnnnnnnnnnnnnnnnnnnnnnnnnnnnnnnntccgacnnnnnnnnnnnnnngnnnnnnnnnnnnnnnnnnnnnnnnnnnnnnnnnnnnnnnnnnnnnnnnnnnnnnnnnnnnnnnnnnnnnnnnnnnnnnnnnnnnnnnnnnnnnnnnnnnnnnnnnnnnnnnnnnnnnnnnnnnaannnnnnnnnnnnnnnnnnnnnnnnnnntgaccagcagaggttgatctttnnnnnnnnnnnnnnnnnnnnnnnnnnnnntctgtctgacnnnnnnnnnnnnnngnnnnnnnnnnnnnnnnnnnnnnnnnnnnnnnnnnnnnnnnnnnnnnnnnnnnnnnnnnnnnnnnnnnnnnnnnnnnnnnnnnnnnnnnnnnnnnnnnnnnnnnnnnnnnnnnnnnnnnnnnnnnaannnnnnnnnnnnnnnnnnnnnnnnnnntgaccagcagaggttnnnnnnnnnnnnnnnnnnnnnnnnnnnnnnnnnnnnnnnnntccgactacaacatccagaaggagtctnnnnnnnnnnnnnnnnnnnnnnnnnnnnnnnnnnnnnnnnnnnnnnnnnnnnnnnnnnnnnnnnnnnnnnnnnnnnnnnnnnntgagcccagtaacaccatcaagaaaagcaaacaggaagatggacgcacctttctcactacactgtctagaaagagcacaccttgtgcttgttcttgggcttgaggggaggtgttttaatttaccccatcttttaagttgttaacaagtttcattgcactttgaataaagttcttgcattcccaaaggtgttggatctcgttttagc

SEQ ID NO: 3422 - DNA, 111 bp, Mesocricetus auratus
acctgtctcttggacattctcgacacagcaggtcaagaggagtacagtgcaatgagggaccagtacatgaggactggggagggctttctttgtgtatttgccataaataat

SEQ ID NO: 3423 - DNA, 521 bp, Cricetulus sp.
  misc_feature (504)..(521): n is a, c, g, or t
aagcttttaccgccaagaggatcccagagaagaggctggagagctacaagagaatcaccagcagcaagtgtcccaaagaagctgtgattttcatcaccaagctcaagagagagatctgtgctgaccccaagcaggactgggtccagacatacacaaaaaaactggaccagagccaagctaaatcagaagctgcaactgtgtataaaacagcacctttgaatgctaacttgacccatgagtctgcagttaatgcatccactactgcctttcccaccacagacttgagaayttctgtaagagtgaccagtatgacagtgaactagtgtgacctggaatgtgatgccttaagtaatattaactttatttaacttattaatgtttcaatatccccctccctgtatacttggatttcttagatgcatgacgtggtttcattgttttccctctgtgaaccctggttctccaccctaaatgttatgagagatgacttttgtaaagatgagnnnnnnnnnnnnnnnnnn

SEQ ID NO: 3424 - DNA, 1254 bp, Cricetulus griseus
  misc_feature (754)..(981): n is a, c, g, or t
atgcgctctctccttctgggctccttctgcctcttggcagtggccctggcagccgaggtgaagaaacctgtagaggcagcagcccctggtactgcagagaagctgagttccaaggcgaccaccctggcagagcgcagcacaggcctggcctttagcctgtatcaggctatggccaaagaccaagcggtggagaacatcctcctgtcacccttggtggtggcctcatccctgggtcttgtgtcattgggaggtaaagccaccacagcatcgcaggcaaaggctgtgctaagcgccgagaagctgcgggatgaggaagtgcacaaggggctgggtgagctcctgcgctccctcagtaactctactgctcgcaatgtgacctggaagctgggcagccgcctgtatgggcccagctccgtgaacttcgtcgaagacttcgtgcatagcagtaaacagcactacaactgcgaacactccaaaatcaacttccgagacaagcgcagtgccctgcagtccatcaacgagtgggcctctcagaccactgacggcaagctaccagaggtcaccaaggatgtggagcgcacagacggggcactgcttgtaaacgccatgttctttaagccacactgggatgagaaatttcatcacaagatggtggataaccgtggcttcatggtgactcgctcctatactgtgggtgttacaatgatgcaccggacaggtctctacaactactatgatgatgagaaggagaagnnnnnnnnnnnnnnnnnnnnnnnnnnnnnnnnnnnnnnnnnnnnnnnnnnnnnnnnnnnnnnnnnnnnnnnnnnnnnnnnnnnnnnnnnnnnnnnnnnnnnnnnnnnnnnnnnnnnnnnnnnnnnnnnnnnnnnnnnnnnnnnnnnnnnnnnnnnnnnnnnnnnnnnnnnnnnnnnnnnnnnnnnnnnnnnnnnnnnnnnnnnnnnnnnnnnnnnnnnnnnnnnnnnngccattgacaagaacaaggcagatttatcacgcatgtctggcaagaaggacctgtacctagccagtgtgttccatgccactgcctttgagtgggacacggatggcaacccctttgatcaagacatctacgggcgtgaggagctgcgaagccccaagctgttctatgctgaccaccccttcatcttcctggtgcgagataatcagagcggctcgttgctgttcattgggcgcctggtccggcccaagggagacaagatgcgagatgagttgtag

SEQ ID NO: 3425 - DNA, 606 bp, Cricetulus griseus
  misc_feature (407)..(425): n is a, c, g, or t
tttagtaacggtgtgtatcaagcatatagcactcacagtataaccttttttcaagctaaatacaaccattttctgccttggactttataattaaatttgcacaggcattgatattttgtagattccttttattagccacttagcctaactctgctggaggtgttgattctaattgtctctcctgttttcctttgtccagggcttttttcttactgtctccccagagtcagtattgaaagttgctcgctatgctgctgagaacaacaggatcttcactttgaacttgtctgcaccgtttattagccagttcttcaaggaatccttgatggaagtcatgccttatgttgacatcctctttggaaatgagacggtgagttgcttttaaaaaaataaaacaaaaaacagcnnnnnnnnnnnnnnnnnnnaactaaagccaggtatggtagtgtgtgcctttaatcccaacattcaggaagcaaaggcagggattgtctctaaaaaacaaaacaattaagtaatcgtctgtttctgggctttgcgtatgtttttctctaccactgtattttctgtatttcttacagaataacttcttgataaaaaaataaa

SEQ ID NO: 3426 - DNA, 2459 bp, Cricetulus griseus
  misc_feature (2440)..(2459): n is a, c, g, or t
gcacgaggcgccttggagccggatccggccccggaaacccgacctgcagacgcggtacctctactgcgtagaggccgtagctggcggaaggagagaggcggccgtcctgtcaacaggcgggggaagccgtgctttcgcggctgcccggtgcgacactttctccggacccagcatgtaggtgccgggcgactgccatgaactccggagccatgaggatccacagtaaaggacatttccagggtggaatccaagtcaaaaatgaaaaaaacagaccatctctgaaatctctgaaaactgataacaggccagaaaaatccaaatgtaagccactttgggaaaaagtattttaccttgacttaccttctgtcaccatatctgaaaaacttcaaaaggacattaaggatctgggagggcgagttgaagaatttctcagcaaagatatcagttatcttgtttcaaataaaaaggaagcaaagtatgcacaaacactgggtcaagtttctcctgtaccaagtccagagtctgcatatactgcagaaaccacctcacctcatcccagccatgatggaagttcctttaagtctccagacagagtatgtttgagccgagggaagttattagctgaaaaagctgtcaaggatcatgattttattcctgctaatagtatattatcaaatgccttaacatggggagtaaagattcttcatattgatgacattagatactacattgaacagaagaagaaagagttatgttcactcaagaaatcaagtacttctgtgagggattcgggaaaaaaagctggcactacaatacaaaaggcgagaacagggagactcaaaaagccttttttaaaggttgaagatgtgaaccggtcttacaggccattctaccttcagctgaccagtgtgccttctataaactatgctacgcacaagccttgcagcccatttgacatagagaagccatccagcgtccaaaagcaagctcagcctaaacccagacctaatacggatggtgataaatgtggtggaaccccagttcaactccaattgaaggaaaagagaaaaaaaggatattgtgaatgttgcttacagaaatacgaagatcttgaaactcaccttttgagtgagaaacacaaaaacttcgcacagagtaaccagtatcaagttgttgatgatattgtatctaagttagtttttgattttgtggaatatgagagagacacacctaaaaagaaaagaataaaatacagcgttggctccttttcttctgtttctgcaaatgtcctgaaaaacactgaaccaaaggagaagctacagttggagcccattttccagaaggacatggtagaaagtaatggacaactgcctgaggagatttttcagtgtgaagatatccagtgtgaagatatccagaaacctgaacaaaggcttgtgttggcttcagaacccatgtcctactcttcaacgggattgaaaggacgtgatgagaaagcagccagcatgttaaatgccagtgaacctgacataaaacagaagtttacacagctacctccatgtaaaaatgaacaggaaggaattcttgatgtttctgaacataaattaattattaatagaaatgatttagaacagagggttggtgactctgtaggtgtgccacggtcatgtgtacaagtttctcatctcagtccagaaaatagtctaccccaaccaaaattaacagcagatactacacatttttcagcaaaagatttacaagaaaaggaccttcattttgtgtttggtcatgattctgatctggtgacattaaatacatcaaaagaacagctaacagtgaaggccggaacgccatcctgtggtcctcagcagcccaatgagtgtgacacggagaatacagataacttgccttgtggtaagatccagcggaaagtgagactgttattagggcagaagaaaaaaaatgtggacccaagtgctgaattggataaaaaaagaactgagtttcttcctatgtgtgaagacagaacttgtgggtcaccagtacagtctctactggacctttttcaaacaagcggggagaaatcagattttttggggtttaccagctacactgaaaacagtgggctatgtgatgttttagatgtttgggaggatgaaaattcaagtagtctgctctcaacatttttctcttccccttcagcttctacattcattggattttagtatttaatgtgtttttcagaagtgacagttttattcttggaatttttataaatacatatataattcttaggagtctgctttttggttttggtttgttctttgccagctttgttgctagaaccatatgtaaatactaagatgatgtttataattttttacagaattgagtagctgttacaaattatacaataaaatcttgtgatttattttacatnnnnnnnnnnnnnnnnnnnn

SEQ ID NO: 3427 - DNA, 391 bp, Cricetulus griseus
gatctttattgccataaagcagagtaactgtgtttgacttggaccttgtttactgtgaactctaatcgaggcaggcgatgcagcatcctcctaatggccatgtggacttgtagatgggtcacttaacccttgcttaagaatccagtttggcttagggtgtgaattgggaatactgttccatgggttgcaatgcagctctactcatgttaccaagcttgctctattgtcaatagcatgcaacatatgttttgtttgcccttctgcttctactttttccagggaagctgctaaagaatgtcgacgtcgaaagaaagaatatgtaaagtgtctggagagtcgagttgcagtgctggaagttcagaacaagaagcttatagaggaacttgaaacc

SEQ ID NO: 3428 - DNA, 2483 bp, Mesocricetus auratus
  misc_feature (197)..(206): n is a, c, g, or t
  misc_feature (1521)..(1541): n is a, c, g, or t
atgttggtctccgattacagatgctaggtgttcaaggagcgtgcaaagacaatcctggagaaaatgcacggcaacttgcccgaattgtgtgtggtactgtaatggctggggagttgtccttgatggcagcattggcagcaggacatcttgttagaagtcacatggttcataacaggtaagattaaagttttacaatnnnnnnnnnntttaaaaaatgcaccaggtgtagtggtgaacttaaatgcaaactgtgggcaggtagagaggcagatcctgtgtgctcactgaggggccagcccagcctacttggcaagtttcaggccttgtctcaaaataaaggataggtggtgcctgaggggtgacatctagtgttttcttttggcctgaacacatgcacacatacatacgcacatacacatgcacctccaacccccatttttcattgttgacattttctatattactaattagtctttttctgacatagatcgaagataaatttacaagatctgcaaggaacgtgcaccaagaagtcagcttgagcagcctgacagtattgaactgaaacacgggcattgggttctcaaggactaacatgaaatctgtgaattaaaaatctcaatgcagtgtcttgtggaagatgaatgaacgtgatcagtgagacgcctgcttggtttctggctctttcagagacgtctgaggtcctttgctcggagactcctcagatctggaaacagtgtggtccttcccatgctgtattctgaaaagatctcatatggatgttgtgctctgagcaccacagatgtgatctgcagctcgtttctgaaatgatggagttcatggtgatcagtgtgagactggcctctcccagcaggttaaaaatggagttttaaattatactgtagctgacagtacttctgattttatatttatttagtctgagttgtagaactttgcaatctaagtttattttttgtaacctaataattcatttggtgctggtctattgatttttgggggtaaacaatattattcttcagaaggggacctacttcttcatgggaagaattacttttattctcaaactacagaacaatgtgctaagcagtgctaaattgttctcatgaagaaaacagtcactgcatttatctctgtaggccttttttcagagaggccttgtctagatttttgccagctaggctactgcatgtcttagtgtcaggccttaggaaagtgccacgctctgcactaaagatatcagagctcttggtgttacttagacaagagtatgagcaagtcggacctctcagagtgtgggaacacagttttgaaagaaaaaccatttctctaagccaattttctttaaagacattttaacttatttagctgagttctagatttttcgggtaaactatcaaatctgtatatgttgtaataaagtgtcttatgctaggagtttattcaaagtgtttaagtaataaaaggactcaaatttacactgataaaatactctagcttggnnnnnnnnnnnnnnnnnnnnntagcgttgtccaggaaaccctgcttgcttgccaagcctaatgaagggaaagtcagctttcagagccaatgatggaggccacatgaatggccctggagctgtgtgccttgttctgtggccaggagcttggtgactgaatcatttacgggctcctttgatggacccataaaagctcttagcttcctcagggggtcagcagagttgttgaatcttaattttttttttaatgtaccagttttgtataaataataataaagagctccttattttgtattctatctaatgcttcgagttcagtcttgggaagctgacatctcatgtagaagatggactctgaaagacattccaagagtgcagcggcatcatgggagcctcttagtgattgtgtgtcagtattattgtggaagattgactttgcttttgtatgtgaagtttcagattgctcctcttgtgactttttagccagtaacattttatttacctgagcttgtcatggaagtggcagtgaaaagtattgagtattcatgctggtgactgtaaccaatgtcatcttgctaaaaactcatgttttgtacaattactaaattgtatacattttgttatagaatactttttccagttgagtaaattatgaaaggaagttaacattaacaggtgtaagcggtggcttttttaaaatgaaggattaaccctaagcccgagacccagaagctagcaaagtctggcagagtggtaaactgtcctgctggggccatccaatcatctctctccattacactttctaactttgcagcattggtgctggccagtgtattgtttcattgatcttccttacgcttagagggtttgattggttcagatctataatctcagccacattgtcttggtatcagctggagagagttaagaggaagggaaaataaagttcagatagccaaaacac

SEQ ID NO: 3429 - DNA, 77 bp, Mesocricetus auratus
tcaaactcctagtgcctgaaggaggagacagtgaccgagctggagactgcagttctctgtccttcacacaggtatga

SEQ ID NO: 3430 - DNA, 141 bp, Cricetulus griseus
tgctgactcttgcagcaccgagctcatgaggagagtccggcgcttccagatcgcccagaacaaatgcctggtcatcaagtatgccaaagacacgcgctatagcagcagcttctccacacatgaccggtcagtcccaccacc

SEQ ID NO: 3431 - DNA, 2027 bp, Cricetulus griseus
gctggcactggctgttttgacctcctgctcgacgctgaaaagtgcaaatatggcatggagatccccaccaatatccctggcctgggggctgctggacgtgagtcagagggctttggctgggtctgtggaggatgggtggggataggcatacgaaggagggtgtctttagtccctgagtgtacttcctcaagaattactctgggtttctttgcagctactggaatgttctttggctctcacccagtccgatgggcggaatatctcctgcaatgacaccctggaaccagtcagacccagcctatggtgcttggtccccaagtgttggtgagtagcctagtccaggaagagaactattggacttcaggggctgtgggggctggggaaagctatgttgttgagctacaactgattccacctgtcctccttctcagggagtggaatgaccccaggagcagctggcttctcgcccagtgctgcatctgatgccagtggctttagcccaggttactctcctgcatggtctccgacaccaggctctccaggctcccctggaccctcaagcccatatatcccctcaccgggtgagttgctgtgctccttccctcttcactccttccttctgtggcaggcttcccatttcttatctcccttttgtctttccctacaggtggtgctatgtctcccagctactcaccaacatcacctgcctatgagccacggtcccccgggggatatacaccccagagcccttcatactctcctacttcaccctcctactccccaacctcgccatcttattccccaaccagtcccaactatagccctacgtcacctagctactcgccgacctctccatcctactcgccaacctctccatcctactccccgacctctccatcctactccccgacctctcccagctactccccgacctctcccagctactccccgacatcacccagctactccccgacttctcccagctactccccgacatctcccagctactcacccacctctcccagctattcccccacctccccaagctactctcccacctcccccagttactcaccgacttcccccagctactctcctacatctccaagctactcgccaacttctccaagttattcacccaccagccctaactattctccaactagtcccaattacaccccaacatcccccagctacagcccaacatcacctagctactcgcctactagtccaaactacacaccaaccagtcccaactacagcccaacctcgccaagctattccccaacttcacccagctactccccaacctcgccaagctattcaccctccagcccacggtacacaccacaatctcccacctacacaccaagctctcccagctacagccccagctcaccaagctacagccccacctcacccaagtataccccaactagtccttcttacagtcccagctctccagagtataccccaacctctcccaaatactcacctacaagccctaaatattcacctacttctcccaagtattctcctaccagtcccacctactcacctaccacaccaaaatactcgccaacctctcctacatactcgccaacctctccagtctacaccccaacctcccccaagtactcacccaccagccccacctactcccccacctctcccaagtactcacccaccagccccacctactcccccacctcccccaagggctccacttactcccccacctcccctggttactcacctactagccccacctacagcctcaccagcccagccatcagccctgatgacagtgatgaggaaaactaagggtgagcagggcgcagcagcagcaggttagggtcagacagccttagtggcctgtgcagtcacttcccttgagctgtgaccctagcctgggccccttgtacataactccttgtgacagaaccctctggaggttctagatcccatttttgatgggcttttcgtcttgtcctcactcgtgctgtcttgggactcactgacagctg

SEQ ID NO: 3432 - DNA, 837 bp, Cricetulus sp.
agtagcgtgagtctcacacttcggttatatcatgttgaagatgaacgggtggcagcgacagagccaaaataaaagccgggacctgaggagcgagtgttccagaaggaagtgtatcttcatacatcaccatacctgaaagcagaacccagtccaactacagacatggcagctgagtccctgccattcaccttggagacggtgtccagctgggagctggaagcgtggtatgaggatctgcaggaggtgctgtcctcggatgaaaatgggggtccctatagctcatcccttggaaacgaagagggggagtcaaaaaccttcactaccctagaccctgcatccctagcttggctgactgaggagccggggccagcagaggtcacaagcagctcccagagcccccgctctccagattccagtcagagctgtatggctcaggaggaagaggaagatcaaggacgaaccaggaaacggaaacagagtggtcagtgcccagcccggggcactgggaagcagcgcatgaaggagaaagaacaggagaacgagaggaaagtggctcagctagctgaggagaacgagcggctcaagcaggaaatcgagcgcctgaccagagaggtagaggccactcgtccgggctctgatcgaccgcatgtaaatctgcaacaagtatgaacaattgggactatcattccccaacttgagtgacctcctgtctctcctggaccatcatgtcaatgccaaggatgctgggtagggagaacaaaggtctcagctagtgtgtatatatattgtacattctttattattttattgtctgtacccggtaaagtgactttgtat

SEQ ID NO: 3433 - DNA, 2703 bp, Cricetulus griseus
ctttcgagcttcttggatttgttttttacctgctgttgttcccgagcccatggagtcgcttcccgctcgattgtttcctggtctctccatcaagattcaacgcagtaatggcttaattcacagtgccaacataagcacagtgaacgtggagaaatcctgtgtttcagtggaatggatagaaggaggtaacacgaaaggcaaagagattgattttgatgatgtggctgcaataaacccagaacttctacagcttcttcccttacacccaaaggacaatctgccactgcaggaaaatgtaacagttccgaagcaaaaacgcagatcagtcaactccaaaattccagctccaaaagaaggtcttcgaagccgttccactcgcatgtccactgtcccagaggttcgaattgccactcaggagaatgaaatggaggtggagctgcctgtggctacaaactctcgaaagcagttttcggttgccactggcctccctaggccctcctgtcctgcaatgacagaattaccgttgtcgatggtcagcgaggaggcagaagagcaagtccatcccacccgaagcacatcttctgcaaaccctgctcggaggaaatcatgtattgtgaaggaaatggaaaaaatgaagaacaagcgggaagagaagagggcccagaactcggaaataagaataaagcgagctcaggaatatgacagcagctttccaaactgggaatttgcccggatgattaaagaattccgggttactatagaatgtcacccacttactctgactgatcctacggaagagcacaggatctgcgtgtgtgtgaggaagcgcccactgaataagcaagaactggccaagaaagaaatcgatgtgatttctgttcccagcaagtgtttgctctttgtgcatgaacccaaattgaaagtggacttgacaaagtatctggagaatcaggcattctgcttcgattttgcctttgatgaaacagcttcaaatgaagtcgtctacaggttcacagcaaggccactggtacagacgatttttgaagggggaaaagcaacctgctttgcctatgggcagacgggcagtgggaagactcacacaatgggtggagacctgtctggtaaatctcagaatacatctaaagggatctatgcaatggcttcccgggatgtcttccttctgaagagtcagcctcgctaccggaacttaaacttggaagtttatgtgacattctttgagatctacaatgggaaggtgtttgatctgctcaacaagaaggccaagctacgtgtactagaagacagcaagcagcaggtgcaggttgtgggacttcaggagtacctggttaactgtgctgatgatgtcatcaagatgctcaacatgggcagtgcctgcaggacttctggacagacttttgccaactccaattcttcccgctcccatgcctgcttccagattcttcttcgagccaaagggagattgcatggcaaattctccttggtggatctggcagggaatgaacgaggggctgacacttctagtgctgaccgccagactcgcatggagggtgcagagattaacaagtctctcctagcactgaaggagtgcatcagggcgctgggacagaacaaggctcacaccccattccgtgagagcaagctgactcaggtgctaagggattcattcattggggagaactcgaggacttgcatgattgccatgatctcaccaggcataagctcctgtgaatatactttaaacacgctgagatatgcagacagagtcaaggagctgagcccccacagcgggctcagtggagagcagccaattcaaatggaaacggaagagatggaagccagctctaatgggacctcgctggcagtcaatttcaaggaagaagaggagctgtcttcccagatgtccagctttaatgaagccatgagtcaaatcagggagctggaagagagggccatggaggagctcagggagatcatacagcaaggaccaggctggcttgagctctctgagatgactgatcagccagactatgacttagagacctttgtgaacaaagcagaatctgccctgactcagcagactaagcacttctcagccctgcgagaagtcatcaaggccctgcgtgtggccatgcaactggaagaacaggctagcaaacagatgaacagcaagaaacggcaccaatgatgacttcaataaagatctgtttatgtcacaccagcctcttcccctatccagcaaactttgggcaccttctggctttggttagggactgagttggatgggttttggtaaatgccaggtaaggggcatcaggcccaggaagactcggagagagaattgctgttctcttgcttagtttggagcaggaggaaggagcttttcatgactgcttccccttttcctccctatcagagggggtgctgtttgggtagtctccctgcggcagcaccctgcccctctgcaacagctgctgatagacaacctgcaaggtccaggctctgggagagaaattggtcctcgtccagcttctactgcctttggtctgtggtatcacccttgctctgagcactcttgtgtcagaaaaaaaaaagtttttgagacctctgttttagttttagaaatccaagatttccatttcctgctgtatgtatttttatgttgtacctaacaataaagaaaga

SEQ ID NO: 3434 - DNA, 1041 bp, Cricetulus griseus
  misc_feature (518)..(544): n is a, c, g, or t
  misc_feature (664)..(681): n is a, c, g, or t
  misc_feature (769)..(802): n is a, c, g, or t
  misc_feature (1021)..(1040): n is a, c, g, or t
cacaaggaagaggaactactggggagcagtggaggaccccctcctgaggagcctcccaaggaaggcaacccagcagaaatcaatgtggagagggatgagaagctgatcaaggtcttggataaactccttctctatttgcgtattgtgcattctctggattattacaacacttgtgagtaccccaatgaggatgagatgcccaaccgctgtggcataatccatgtccggggacccatgccgcccaaccgaatcagtcacggagaagtgctggagtggcagaagacgtttgaggagaaactaacccccctgctgagtgttcgtgaatcctttctgaggaagaggcccagaagatgggtcgtaaagactgaacaggaagtggagaagtttgttacctccaacacacaggaactgggcaaggataagtggctatgtcctctcagtggcaagaaattcaagggccctgagtttgtgcgcaagcacatcttcaataagcacgcggagaagatcgaggaggtgannnnnnnnnnnnnnnnnnnnnnnnnnntcctcacggatgccaagcgcccagcattgcccgagatgaagccagctcagccacctggccctgcccagatactccccccaggcctgaccccaggacttccctacccacaccagacgccannnnnnnnnnnnnnnnnnggccagcccgcccttcccatctttgggctatggagctggtgctgtccgccctgcaggtcccaacaggagggcctccatatccccatgnnnnnnnnnnnnnnnnnnnnnnnnnnnnnnnnnnttttcgaggccaaggaggatatcctgggaaacctcggaacaggatggttcgaggagacccgcgggccatagtggagtatcgggacctggacgccccagatgatgttgatttcttttgagacatctgccgccctcactctacatctgctgccctctatccccgggaccacttaccccatgagctgacaggttttttgtacgttatttttcctgctagttnnnnnnnnnnnnnnnnnnnnc

SEQ ID NO: 3435 - DNA, 2216 bp, Cricetulus griseus
  misc_feature (45)..(65): n is a, c, g, or t
  misc_feature (569)..(586): n is a, c, g, or t
  misc_feature (1007)..(1024): n is a, c, g, or t
  misc_feature (2176)..(2190): n is a, c, g, or t
ttgggtctttgacttcgagtcgtgagagagagtcgtgagtcattnnnnnnnnnnnnnnnnnnnnncagaatgcattttagggactttaactacaattttagctccctgattgcctgtgtggcaaacggtgatgtcttcagcgaaagtgaaaccagggccaaatttgaatccctcttcaggacgtatgacaaggacatcactttccagtattttaagagcttcaaacgtgtccgaataaacttcagcaaccccttatccgcagctgacgccaggctgcagctgcataagacggagttcctggggaaggaaatgaagctgtactttgctcagacgttacacataggaagctcacacctggctccgcccaatccagacaagcagttcctcatctctcctcccgcctctccaccagttggttggaagcaagtagaagacgctaccccagtcataaattacgatcttttatatgctatctccaagctggggccaggtgagaagtatgagctgcatgcagcaacagacaccactcccagtgtggtagtccacgtgtgtgaaagcgaccaagagannnnnnnnnnnnnnnnnntggagagaatgaagagacccaagccaaaaattatccagacgaggaggccagagtacacgcctatccacctcagctgagctggctcacagatggagacggcacattctaaaccccactcatggggagggatcttttactgtgcaggtggctggtcatagctttggaggtgacagccgtgaccactgtggcagaaattccagttcatgttgactcagaagagaatcaaggctttgtctccttgttctgatactgcacctcagtccatgtccgtggcacccaggaatgtcttgggccattcactgagttggtggtaatcacacaaggatatctggggacatctccagaaaactgataatggtagtgtcttgtactcactcttttctaggttctgtttttgccaaggacaggttgactggtggcnnnnnnnnnnnnnnnnnngtttccaaccagcattcagggtccaggccccactggtaggcagaggcaccccacaaagccaccaagtgtccagtgcagaaaggttatgggacaaccccagtgccatgtggaaattgtacgtctcatttttcccctcgtgttctaacgttcacgcatgtatgactgggttccaagactaacctttgctcgtgtatgaatacactgttgttttccgccttgggaagctggggagacaggcactggaaaactatggtctttcctggtccctggccttctctgcaacagcacccatacgtggggtcgcaaccgggagatgcccacacgtcaccctgtccagcgcaccatgtcacctgtgctttcttgcacaagttgatcttgagttcctgtgtagaatgtagcttatacgatggcagacaccagttttgctgtcaggtgccagtgggtgggaagttgtaggttaggtgtttgggttcagacatcagtttctattgtttctttcatggagtggtttatatgtgaatttcagccaaaaacctctttgggaactgttgattgagacagtttttcaccccattgaaacatgaagataaacttgtaaataaagccaagagcatatcttaatgcctgtggtgtacctgggtgagaacagagggtagaaggagtctcgagctccctgtgacttgcgtgtggtagaaatatctgtcatgtgtttaacgggatgactttggagcatgtggagtcatagctgtgtgttgctagagggacacaggcctttctttcccctttcatcccagatggaccgtgaccatttgggactttctccttttgtagtcaccacgtgtgtgtctggtaaataggtattctgttttggtctcacagcaccattacaagtctgtcactctgaaataacctaatgccaattaacagtgcatgctttgggagttgggaaggcagcttcctctggggagtgtatttgctgacattgagttttccatcagtcctcaatgagaaatggatggcgtgtttgccaaaccctgttcacagcactcaggggagggtgccagcaaggtggagaccggcctcacattgctgttctgattcctacttcagtgctttggaagccggagaggccaacctcaagggtattttttnnnnnnnnnnnnnnnataaatcagcacagcctgctctctgg

SEQ ID NO: 3436 - DNA, 3249 bp, Cricetulus griseus
  misc_feature (2248)..(2263): n is a, c, g, or t
  misc_feature (2395)..(2412): n is a, c, g, or t
  misc_feature (3221)..(3249): n is a, c, g, or t
ggcacgagcatgaaaccagcgaaagctaagatgcccaggaaacctgtattaaaaaaaggatctcagacaaaccttaaagatccagttggggtgtattgtagggtgcgcccactgagttgtcctgatcaagaatgctgtgtagaagtggtcagtaatacaacggtgcagctccatactcctgagggttatcgacttaacagaaatggagactataaggagactcagtattcatttaagcaggtatttggcactcacaccactcagagggaactttttgaagttgtggctagtccattggtagatgacctcattcatggcaagaatggtctgttgttcacatatggtgttacaggaagtggaaaaactcacacaatgacaggttctccagggtccggaggtctgcttcctcgttgtttgaacatgatctttaacagcataggatcatttcaagcaaaacgttatgtttttaaatctaatgataggaacagcatggaaatacagtgtgaagttgatgccttattagaacggcagaaaagagaagctgtatccattccaaagaccccctctagcaagagacaagcagatccagaattttccgatatgataaatgtacaagaattttgcaaagcagaagaagttgatgaagacagtgtctatggtgtatttgtctcttacattgaaatctataataattacatatatgatctattggaagaggtgcagtttgatcccataaagcccaaactcccacaatctaaaatactgcgggaggataagaaccacaatatgtatgttgcaggatgtacagaagtagaagtgaaatctacagaagaagcttttgaagttttttggagaggtcagaaaaagagacgtattgctaacacccatttgaatagagaatccagccgttcacatagcgtgttcagcattaaactcgtccaggctcccctggatgctgatggagacaatgtcttacaggaaaaagaacaaattaccataagccagttgtctctggtagatcttgctggaagtgaaagaaccaaccggactaaagcagaagggaacagattacgtgaggctggtaacattaatcagtcactgatgacgcttagaacatgcatggaagtccttcgagagaaccagacatatggaactaacaagatggttccgtatcgagattcaaagctaactcatctgttcaagaactactttgatggggaagggaaggtgcggatgatcgtgtgtgtgaatccaaaggctgaagattatgaagaaagcttgcaagttatgagatttgctgaagtaacccaagaagttgaagtagcgagaccagtagacaaggtgatatgtggcttgacaccagggagacgatatagaaacctgcctcggggcggcccagttggagatgaacctttggtgactgaagtgagtctacagagcttcccaccactgcctccatgcaaacttttggatatcaatgatgaggagacccttccaaagctgatcgaaactttggagaaacgacatcgcctacgccaagtaatgactgaggagcttaacagacaatgtatgactttcaaagccttattaaaagaatttgacagttctctttcaaataaagaaaactacattcaggaaaaactaaatgaaaaagaaaaattgatctcaggacagaaatcagaaatagaacgactggaaaagaaaaataaaacattggagtataagatcgagattttggagaaaacaaccacgatctatgaagaagataaacgcaatctgcagcaggaacttgagagccagaatcagaagcttcagcggcagttttctgacaagcgcagattagaagccaggttgcaaggcatggtgacagaaacatcgatgaaatggcagaaggaatgtgaacggtcggtggcagccacccagctggagatgcagaataaactgtgggtcaaagatgaaaagctcaaacagttgagggccattgtgactgaaccaaaacctgagaagccagagagaccctcccgagaaagggaccaggaaaaaatcattcagagatcggtctctccttcgcctgtgcctctttctagtaacaatattgctcagatttccaacggccagcaactcatgagccaaccacagctacacaggcgctctaactcttgcagcagcatttctgtagcttcctgtatttcggaatgggagcagaaactatctccgttcagcacacctgtcaatgtcacctctcttnnnnnnnnnnnnnnnnaggagccaggacaaagtaaaacatgtatcgtgtcagacagaaggcgagggatgtactggactgaaggcagggagatggtccctacattcagcagtgagataggcgtagaagaggaccattgccacaggaacnnnnnnnnnnnnnnnnnncacagaaggtcccgctctgcagggagcagatgggtagatcataagcctgcctctaatgtgcaaactgagacagtcatgcagccacatgtccctcatgccatcacagtatctgttgcaaatgaaaaggcgctagctaagtgtgagaagtacatgctgacccaccaggaactagcctccgatggggagattcagactaaagtaattaagggtgatgtttataagaccagaggtggtggacaatctgttcagtttactgatattgagactttaaaacaagaatcgccgactggtagtcgaaaacgaagatcatccacagtagcacctgcccaaccagatggtacagagtctgaatggaccgatgtagaaacaaggtgttcagttgctgttgagatgagagcaggatctcaactgggacccggatatgagcatcatgcacaacctaagcgaaagaagccttgacctgatagccctggtggccgaagaatgtttttgtttgtgttggtgatttctccaaagctgtgccagacgcagtatctgaatcatcctacagaagaatgtatctggatcacattgtattttttattgtgacttttccaactgttctgaatattttctaaggttttataaaaaaaaaaaatgctgctattgattagccgcaaaaaatgcactttagacatatttaagaatttaaagatggtgagtgggcaatggtaaaaccattttaggaagatgtttagaattctgtatgtatatattcactttctgcttttatatatgccaaaagaattgaaataaaaagcactaaaaannnnnnnnnnnnnnnnnnnnnnnnnnnnn

SEQ ID NO: 3437 - DNA, 2312 bp, Cricetulus griseus
  misc_feature (2286)..(2312): n is a, c, g, or t
cgggggtgcggtgctatcccggctccagaccacttcgcggaggctctgctcgggctgcgtcgcgcaggctcgcagaggacgacggccccgggtcgctggccccggaccccttccttcccttgcagcccgtcccggccgagcacagtggacatgcaggcgcagaggccccctttgttggaagtgaagaggaactttgagctgaagacaaccctggtcaaggcctcttccgcccgcctttcagggagcaggctcaagaggggccctgaccagatgaaggaagccctagagcctgcaaagaaacggacacgaggcctgggtgcagtgaccaaaattgacacatcccgctccaaaggaccactcctgagctcactgtcgcagccgcagggccccactgcagctcagaaaggccctaagaagacaggacctcgtggttgcactgccgttggatcagtgctgaagaaccagaagctggctcccactgctcctgcccagaagcctgtcaggaagaggcctggtaagcgtcctgactgggacttaaagggtcagttgtgtgacctcactgaagagctgaaatgctaccgggagaagactcaaaagctggaccaggagaaccaagggcttcaggagcaacttaaagaagcccaggagcaggccgcagccctggggacagagcggaacaccctggaaggggagctggccagtgtgcggacgcaagcggagcagtgccagcagaaactggaggctctgtgtgcccgtgtcttggagctggaggaatggctgggcaccaaggaaaacctgattcaggagctccagaaagagcagctggaattgcaggaagagcggaaggcattggccacccgactggaagagcaagagaggaggttacaggcctcagaagccgctctgctaagcaacgaatcggaggtggtgtgtctgcggcagaagaccgcagcccaggtgaccttactggctgagcaaggtgaccggctccacgggctagagatggagcgccgccgactccacaaccagttgcaggaacttaagggcaatatccgggtattctgccgggtgcgccctgttcttgcaggggaacctactccatcgcctggctttctcctgtttccccatggccctgctggaccctctgaccccccaacccgccttagcctttcacggtctgatgatcggcgttcgaccctgaccagggcgcctgcacccactacgcgccacgatttctcctttgaccgggtgttcccaccaggaagcaaacaggaggaagtgtttgaggagatttccatgctggtccagtcggcactggacggctaccctgtgtgcatctttgcctacggacagaccggcagtggcaagaccttcactatggagggcaggcctgggggagacccccagttggaggggctgatccctcggcgcatgcggcatctcttctctgtggctcaggagatgagtggccagggctggacctacagttttgtggcaagttacgtagagatctacaatgagaccgtccgagacctgctggccactgggacccggaaggggcaaggcgagtgtgagattcgtcgagcaagaccaggcagtgaggagcttactgtcaccaatgcacgctatgttcctgtttcctgtgagagagaggtggaggctctgctccatttggcccaccagaatcgagctgtggcccgcactgcccagaatgagagatcatctcgaagtcacagtgtgttccagctgcagatttctggagagcatgctgctcggggcctgcagtgtgtcgctccccttaaccttgtggacctggctgggagtgagcggctagaccctggtttaaccttaggccctggggaacgtgatcgccttcgggaaacacagtccattaatagcagtctgtctaccctgggactggtcataatggccctgagcaataaggagtcccacgtgccttaccgaaacagcaagcttacctacctgctgcagaactcgctgggtggcagtgccaagatgctcatgtttgtgaacatttcccctctggaagagaatgtctctgagtctctcaattcactacgttttgcttccaaggtgaaccagtgtgttatcggtactgctcaggctaataagaagtgaagatggccagagcctggttccgctgccgctgggttgattgtgtctctctctgtgtgtactgggggggagaggggggtgagagatacgcttttattgggtggacatcatttgtacccaactatcaaataaagaaattttgttgtagannnnnnnnnnnnnnnnnnnnnnnnnnn

SEQ ID NO: 3438 - DNA, 2061 bp, Cricetulus griseus
  misc_feature (298)..(315): n is a, c, g, or t
  misc_feature (481)..(505): n is a, c, g, or t
  misc_feature (562)..(595): n is a, c, g, or t
  misc_feature (870)..(886): n is a, c, g, or t
  misc_feature (888)..(905): n is a, c, g, or t
gtcaacttctcagagttctcgaagaagtgctcagaaaggtggaagaccatgtctgctaaagaaaagggaaaatttgaggacatggcaaaggctgacaaagctcgttatgaaagagaaatgaaaacctacatcccccccaaaggggagaccaaaaagaagttcaaggaccccaatgcacccaagaggcctccttcggccttcttcttgttctgttctgagtatcgcccaaaaatcaaaggagaacatccagggctgtccattggtgatgttgcaaagaaactgggagagatgtggaacnnnnnnnnnnnnnnnnnnaagcagccctatgaaaagaaggctgctaaactgaaggagaagtatgaaaaggatattgctgcttacagagctaaaggaaaacccgatgcagcgaaaaagggggtggttaaggcagaaaagagcaagaaaaagaaggaagaggaagatgatgaggaggatgaagagnnnnnnnnnnnnnnnnnnnnnnnnngaagacgaagatgaagaagaagatgatgatgatgaataagttggttctagcgcagtnnnnnnnnnnnnnnnnnnnnnnnnnnnnnnnnnnctcattaaagcatttaacccccctgtacacaactcactccttttaaagaaaaaaaaattgaatgtaaggctgtgtaagatttgtttttaaactgtacagtgtcttttttttgtgtgttaacacactaccgatgtgtcttggatggtcctgtcctggtggtattttcaatgaccactaacctgcctggtacagtctgggggttgtaaattggcatggaaatttaaaggcaggttcttgtttacacagcacaaattagttatatatggggacggtannnnnnnnnnnnnnnnncnnnnnnnnnnnnnnnnnnggttttttttttccatcttcagttgtctttgatgcagcttatacgaaaataattgttctgttaactgaataccactctgtaattgcaaaaaaaaaattgcagctgttttgttgacattctgaatgcttctaagtaaatacaatttttttttattagtattgttgtccttttcataggtctgaaatttttcttctcaaggggaagctagtcctttgcttttgcccattttgggtcacatgaattattgcagtgtttcttttcgtatagttagctggagaaaagcttttatctacacaccctgcatattgtgatgggtaacattttcatccatagttgaaagcccaaaattgtgattagttggataagagatagtacataaaccatgtgcaaaactgagagtgatcaattctatcacaccatggaataagaatcgaacaatctgaaagtctgccttgaaggactagtagaaaattgtgttctaatccttacgtgaggactcttcttaacgtcattactgtgtaatggcagttacattctgcagttccctattaaagacctgagaatgtatccctcaaaagcgtgagctaaaatacaagactgccatattaaactttgtgacattggtcctagcgaaggctatgataagaacgctggctgtaatgcctttgcccatctatctaaatacaggattgctcaggaaacttgactgtttaaaaaaaaagtatttttaattagttgagccagcttttcttaaaattatgccacatataaaattaagggtatattttcctacattgtgatttgtcccttataaatcagatacaaggaaagatgataaactttgcatattagtaccagttgtccaatccatttggtttttctttataaaacccaaactcattagtcatgtttaatctgcttagcagttagggaacaatttggcaattttgtgttttttttttgagattatcattctcttaaagtgccagtgtttttaaaatagcgttctgtaattttacacgctttgtgatggagtgctgtttgttatataattttgacatgggttctttacattgcgtttgtttatgtaatttgaggaggaatactgaacatgagtcctggatgatactaataaactaataattgcagaggtttt

SEQ ID NO: 3439 - DNA, 900 bp, Cricetulus griseus
  misc_feature (127)..(155): n is a, c, g, or t
aacacgcggtgtcttgtatgcattgaatggcatagaccacgtgggacctaatttgcaagtattgggtcttcgacttcaagtgcaatgtgtatgaaaaccaatctgagccttgtattctcttaaatannnnnnnnnnnnnnnnnnnnnnnnnnnnnccgcgtgagctgttccaaaaagggttctcgggtcatttcaaagctgcgtggggggagctcagcaataccgtatcagctgtgacctccctcagtcacacccaccactgcaccctagtcctttgacatactccagttttgggaatttagtaatttttacttacaaatttacctttttttgtattctgcaatggaactgtttttggtttgttttaaattctatggaactgactcattgaagcaraagttggtccccaggcaggacagaagctcggtgcctgtgtggacggctgggtttgggttcactcacatgctgatgtgcattggggttttgctagttttgttttgaggaaaatgtctggagtaaactggttttctgaaacaactttggttagaagaaaatgggttgttctggatttctgggcaatccttgaaatttcctggaaataaaaacaaatgatcggtcctccaaaggtattcttcagctaagacttatgtgtcttaagaaaagctactagaagaaaaggaaatgaatttggtgatgtacttgattatatatgatgagtattttttttctgttaaactggaaataaatctattaggaataatgtaaccaaaaaatgtgaatccgaagaatgtttttttgccaatagtttatagcaggtacactgaaccaaagtgatggaatttgtaaaaatggtaattagtaccaaccacattcactgtccccgatctgaacacccagcga

SEQ ID NO: 3440 - DNA, 873 bp, Cricetulus griseus
  misc_feature (681)..(681): n is a, c, g, or t
  misc_feature (765)..(779): n is a, c, g, or t
acaatggagtagtcttgtccaccgagagcagtgtggcagtatatggaacactaaacctaactccaaaaggcaaacaggctccgggaggccatgagctgagctgtgacttctgggagctggtggggctggccccagctgggggggctgataacctgatcaatgaggagtctgacgtagacgtccagctcaacaaccggcacatgatgatccgaggagagaacatgtccaaaatcttgaaagcacgctccatgatcaccaggtgcttcagggatcacttcttcgacagaggctactgtgaagttactactccaacactggtgcagacgcaggtggaaggtggggccacactcttcaagcttgactattttggagaagaagcgtttttaacccagtcctcgcagctgtacctggagacctgccttccggccctgggggatgttttctgtattgcccaktcatacagggctgaacagtccagaacacgaaggcacctggctgaattcactcatgtggaagctgagtgtcccttcctgacctttgaggacctcctgaaccgtttagaggacctagtgtgtgatgtggtggacagagtcttgaagtcaccagtggcaagcatagtgtatgacctcaacccgaactttaaaccccctaaacggcctttcaggcggatgaactattcanaagctatcgagtggctgagggagcacgatgtaaagaaagaagacgggacactctatgaatttggagatgatattcccgaagctnnnnnnnnnnnnnnnacagacaccattaatgaaccaatcctgctgtgtcgggttcctgtggagatcaagtccttctatatgcagcgatgtgcctgagatcctcgactta

SEQ ID NO: 3441 - DNA, 580 bp, Cricetulus griseus
  misc_feature (247)..(262): n is a, c, g, or t
  misc_feature (426)..(518): n is a, c, g, or t
agccggtgctaagaagtcgctctgagatcgcgccgcttargtttttctgttcctttttttcttcctgtttatctccaagcagccagcggcccatagaaacatgaccaccaatatgggccccttacatccatactggcccaggcacttgaggctggacaactttgtgcctaatgacctccctacctggtatatcctggttggcctgttctccgtctctggggtcctaattgtgaccacttggctgctnnnnnnnnnnnnnnnngttgccccacttggaaaatgtcgtcgactggccctgtgctggtttgctgtgtgtgcattcattcaccttgtgatcgarggttggttctctttctaccatggcatccttcttgaagaccaagctgtcttatcccaactctggaaagagtattccaagggagacannnnnnnnnnnnnnnnnnnnnnnnnnnnnnnnnnnnnnnnnnnnnnnnnnnnnnnnnnnnnnnnnnnnnnnnnnnnnnnnnnnnnnnnnnnnnttctccaccagaaatccttccgctttatcctacagctcgtggtctctctgggccagatgtac

SEQ ID NO: 3442 - DNA, 554 bp, Cricetulus griseus
  misc_feature (508)..(508): n is a, c, g, or t
agtgggctttcggatcatgtctggtggctccgcggattacaacagagaacatggcggcccagagggaatggaccccgatggtgtcatcgagagcaactggaatgaaattgttgataactttgatgatatgaatttaaaggagtctcttsttcgaggcatctatgcttacggttttgagaagccttcakctattcagcagagagctattattccttgtattaaagggtatgatgtgattgctcaagctcagtcaggtactggcaagacagscacatttgctatttccatsctgcaacagktggagattgagttcaaggagacccaagcactagtattggyccccaccakataactggctcaacagatccaaaaggtaattktggctcttggagattatatgggagcaactkgycrtgcttgcrttggaggaacaaatgtycsgaatgagatgcwgaagttgcasgctgaarctsctyatattgktgkgggyacaccwtgaasagtcgtntgatatgctaaacagaagatacctttctccaaatggatcaaaatgt

SEQ ID NO: 3443 - DNA, 621 bp, Cricetulus griseus
ttacctcagtggcagacggctcctggctgacggctggcaggaagcakggcgtcgggatgagtgcaggctcggaccccgtggttatcgtctctgcggcgcggaccgccatargctccttywwtggtgccctgtctactgtgcctgkcsacgacctcgggacaactgtcatcaaagaagtcctgcakagggccaaggtggccccasaagadgtgtccgakgtcatattwggacacgttttgacggcaggttgtgggcagaatcctactcgacaggccagtgtgggtgcakggatcccctactcagttccagcatggakctgccakatgatctgyggctcawgcctcaaggccgtgtgtcttgcagcccagtccatagccataggtgactccakcattgtggtggcaggaggcatggagaacatgagcaaggcccctcactyggctcacctgakagcakgagtcaagatgggtgakatgccgctagctgacagcatactgtgtgatggtcttacagatgcgtttcacaactatcatatgggcatcacagctgagaatgtggccaaaaaatggcaagtgagtagagaagcccaggacaaggttgccgttgtgtcacaaatcaggg

SEQ ID NO: 3444 - DNA, 656 bp, Cricetulus griseus
  misc_feature (442)..(471): n is a, c, g, or t
agtgccggggccagtcggtggtccttccccacctcacccacttctcctgcacagatgatgtgtttgcctgctttgccacccctgcagtctcgtggcgcctcctgtctgtggagcatgaagactttttaacagttgcagattcactgaagaaagaatttgatagtccagaaactgctgatctgaggtttcgaattgatgggaaatatattcatgtccataaagctgttttgaaaatcaggtgtgagcacttccgatccatgttccagtcctactggaatgaggacatgaaggaggtgatagagatagaccagttttcttaccccgtgtaccgtgcctttctccagtacctctacacagacacagtggatctgccacccgaggatgccataggtctcttggacttggcgacatcgtactgtgaaaacagactgaagaggctttnnnnnnnnnnnnnnnnnnnnnnnnnnnnnntggaaaacgctttctcattattctctgctgcagtcagatatgatgcagaggatttagaagaattctgctttaagttttgcatcaatcatttgacagaagttacacagactacggcattttggcaaatggatggccccctgctaaaggagttcattgctaaagccagtaaatgtggagcctttaag

SEQ ID NO: 3445 - DNA, 894 bp, Cricetulus griseus
aaacagacaactgctaaatgaaagaattaaactagaaggtattattactcgagtagagacttacttgaatgagaatctgaggaaacgcttggaccaagtagaacaggaacttaatgaactgagagagacagaaggtggtactgttcttactgccacaacatcagaacttgaagctataaataaaagagtaaaagatactatggccagatcagaagatttggataattccattgacaaaacagaagctggaattaaagagctccagaagagtatggagcgctggaaaaatatggagaaagagcacatggatgccataaatcatgacaccaaagagctggagaagatgaccaaccgacagggcatgctgctgaagaagaaggaagagtgcatgaagaaaatccgggagttggggtcccttcctcaggaagcctttgaaaagtaccagacactgagcctgaagcagttgtttcgaaaacttgagcagtgcaacacagaattgaagaagtacagtcacgttaacaaaaaagctttagatcagtttgtgaatttctctgagcagaaagaaaagttgataaagcgacaagaggaactggataggggctacaaatcaatcatggaattaatgaacgtgcttgaacttcgaaaatatgaagctattcagttaactttcaaacaggtatctaagaacttcagtgaagtattccagaagttagtacctggtggcaaaacaactttggtgatgaagaaaggagatgtggagggcagccagtctcaagatgaaggagaagggagtggcgaaagtgagaggggctctgggtcacagagcagtgtcccatcagttgaccagttcacaggagttggaatcagggtgtcatctacaggaaagcaaggtga

SEQ ID NO: 3446 - DNA, 1053 bp, Cricetulus griseus
  misc_feature (400)..(417): n is a, c, g, or t
aagttgttggcagttagtaagaatcccagcaaacctcattttaatcactatatgtttgaagcaatatgcttatctataagaataacctgcaaagctaaccctgctgctgttgtgaactttgaggaggctctgttcctagtgttcactgaaatcttacagaatgatgtgcaagaatttatcccctacgtttttcaagtgatgtctttgcttctggaaacacacaaaaatgatatcccgtcttcatatatggccttgtttcctcacctccttcagccagtgctctgggaaagaacaggaaacatccctgctctagtgaggctccttcaggcattcttagaaagaggctcaagtacaatagcaagtgctgcagctgacaaaattcctggattactgggtgtcnnnnnnnnnnnnnnnnnntccaaagcaaacgatcaccaaggcttctatcttctcaacagcataatagagcacatgcctcctgagtcagttgaccaatacaggaagcagatcttcattctactgttccaaagactgcagaactccaagaccaccaagtttatcaagagtttcttagtgtttattaatttatattgcattaagtatggggcattagcattacaagaaatatttgatggcatacaaccaaagatgtttggaatggttttggaaaaaatcattattccagagattcaaaaggtatctggaaatgtggagaaaaaaatttgtgcagttggcataaccaaattactcaccgaatgtccaccaatgatggacacagagtacaccaagctatggactcctttgttacaatctctcatcggcctttttgagttgccggaggacgacaccattcctgatgaagagcattttattgacatagaagatacaccagggtaccagactgccttctcacagctagcatttgctggcaaaaaggaacatgatcctgtagggcagatggtgaataacccgaaaatccatctggcacagtcacttcacaaactgtctactgcctgtccggggagggttccctcaatggtgagcaccagcctc

SEQ ID NO: 3447 - DNA, 561 bp, Cricetulus griseus
  misc_feature (282)..(299): n is a, c, g, or t
  misc_feature (423)..(469): n is a, c, g, or t
tcagcgctaggcgcccggcccagcttctttttcaaaatgtctactgtccacgaaatcctgtgcaagctcagcttggagggcgatcactccacacccccaagtgcctatgggtcagtcaaaccctacaccaactttgatgctgagagggacgctctgaacatcgagacggctgtcaagaccaaaggagtggatgaggtcaccattgtcaacattctgactaaccgcagcaatgcacagagacaggacattgccttcgcctatcagagaaggaccaaaaaggannnnnnnnnnnnnnnnnngtcagccttatctggccacctggagtcggtgattttgggcctattgaagacacctgcccaatacgacgcttctgaactgaaggcctccatgaagggcctggggactgatgaagactccctcatnnnnnnnnnnnnnnnnnnnnnnnnnnnnnnnnnnnnnnnnnnnnnnngagtgtacaaggaaatgtacaagaccgatctggagaaggatatcatttctgacacatctggtgacttccgaaagctgatggtcgcccttgca

SEQ ID NO: 3448 - DNA, 526 bp, Cricetulus griseus
catcaggatggtgcaggmcaagagctggaccctgaagaagcactttgaaggcttccctactgacagtaacttcgagttgaagactactgaactcccacccttaaataatggggaggtcttgctggaagccctgttcatctctgtgratccttamrtgagaattgcatcgaaaagactgaaggagggtgataggatgatgggtgagcaagtggccagagttgtggaaagcaaaaatccagccttccccgcaggaaccatcgtagtggctttatcaggctggacatcacattccatttctgacgggaatggactgaggaaactgccagcagagtggccagacaagttaccactgtctttggctttggggacagttggcatgccaggcctcactgcctactttggcctgcttgacatctgtggtgtgaagggtggagaaacagtgatggtcaacgcatcagcaggagcagtggggtctgtagtggggcagatagctaagctcaagggctgcaaagttgttggtgcagca

SEQ ID NO: 3449 - DNA, 596 bp, Cricetulus griseus
  misc_feature (263)..(278): n is a, c, g, or t
aaatgaatcaccaacctgcagttttgtgtcagtgcccaaaggagagaggttgatggtgcttaacagacatgaagtatgtgtagtaagagtatttatccagaattaaaatatagggttgtgtaaaaggcggggagagaagagtagagtgagttggaggaaggccgtgctcccagtgggtcccaktgcagcccatctgcaggtctcgctcakgcaggcgctcacacgtgggtctcaccactgkgacaactatgctttcactgccnnnnnnnnnnnnnnnntcttactgagagccaagggcaacacaaagctatgactgcaccgtgatgctggacttttcacctcaacttaaatgaagttttgtccacggtctggaccatctaagagtgagtagctgtctgctgtttcaktcgtcaggagccgaaattgtttccatcactccagagtggagaggactttcccacakccctatggagcttgcaatctgtgattgccttgtaaaaggttgagtgtgcaggtcactgcattaaacacgcggtgtcttktatgcattgaatggcatakaccacgtgggacctawtttgccagtattgggtcct

SEQ ID NO: 3450 - DNA, 581 bp, Cricetulus griseus
  misc_feature (8)..(8): n is a, c, g, or t
  misc_feature (69)..(69): n is a, c, g, or t
  misc_feature (155)..(169): n is a, c, g, or t
  misc_feature (465)..(465): n is a, c, g, or t
  misc_feature (473)..(473): n is a, c, g, or t
  misc_feature (508)..(508): n is a, c, g, or t
  misc_feature (574)..(574): n is a, c, g, or t
  misc_feature (580)..(580): n is a, c, g, or t
cgcagaangcggcggtagcgggtggcttgtggtgcagctttaccacagaaggaaccgcgcaggccttantgtgagtggtcactgtagatcccgggaacctggtggccttagtccttcaggtggatcagcgtgcgacatgggaaagaaaaccaagnnnnnnnnnnnnnnntcttcttccgaggatgaggaggagtatgtggtggaaaaggtgttagacagacgcatggttaaggggcaagtggagtatctgttgaagtggaaaggcttttctgaggagcacaatacttgggaacctgagaagaacttggattgtcctgaactaatttctgagtttatgaaaaagtataagaagatgaaggagggtgaaaacaacaagcccagggagaagtcagaaggaaacaagaggaaatccagtttctctaatagtgctgatgatataaaatctaaaaaaaagagagagcagancaatgatntcgctcgaggctttgagagaggactggaaccaganaagatcatttggggcaacagattcctgtggtgacttaatgtttcttaatgaaatggaaagacacanatgaanc

SEQ ID NO: 3451 - DNA, 755 bp, Cricetulus sp.
cgggaagctgaggtttttcctatgtctgaacaatgacgccatcgttttctgggtcttcgaagcagttgcaaagaaatgcccagatggaggacagagggccaaaccaccccagtgaattcataacaggagataacttgcttaagacctgactgtttttaaaagcgaatgccagtgagtgaaatgccagctccctgtacagttactagagctcctgggaatgcatggccagtgacacaagtgagaattggatgttatgaccgtccagaaaagacaagatgagaaagtgcagtattgactgtcttcaaacgcacctgtccttgctcaagtgctgggattgtgtgccaacggctatgatagatatgaatagagcacgagataatgtgcttacagaaagttggttgaattgaatgcaattaatgtttggaggcacttagtcttctagtgtttgaatgtggatggaattaaagctgggtttgtagtgagccattaggattatggcaaatgtctagtgtacagaattcagtgtaggccgggagttgagactggtgtgtgtttagtggattatctgatcagcacatgtgtgacagtgttgatcacaagtcattgccagctctgttcattttcttccctggtctaactcaataattgccatcatgaaaattctgggtgactttttgtgactaaagtcccattgtaagccacattctttgtccagcagtgctcactgactgctgaaataaatgttcatttgcaac

SEQ ID NO: 3452 - DNA, 3443 bp, Mesocricetus auratus
  misc_feature (955)..(999): n is a, c, g, or t
  misc_feature (1860)..(1922): n is a, c, g, or t
ggcccagctggcgcgccgcagctctgggcctgcgcgcaaaggggttaggggtcacggcggcgtagtttgtggcgggaaaagcagtttgatgcgggatggattttaagcggcgacaaggaccaggccctggggtgcccccaaaacgggctcgtgggggtctctgggatgaggacgagccatcgcaatttgaggagaacttggcgttgctggaggagatagaggctgagaatcggctgcaggaggcagaggaggagctgcagctgcccccacagggccctgcaggtgggcagttttccactgcagacattgacccacgctggaagcggcccgccctgtgtgccctggatcccaacacggagcccctcatcttccagcagctagagattgaccactatgttggctcagctgtgccactgccaggaggacccccaacgtcctgtaattcagtgcccatactacgggcctttggggtgactgatgagggcttctccgtctgctgccatatccatggctttgcaccctacttctacacccctgcacctcccggttttggggccgagcacctgagtgacctgcagcgagagctgagcacagccatcagccgggaccagcgtggtgggaaggagctgtcggggccagcagtgctggcaatagagctgtgctcccgtgagagcatgtttgggtaccatggtcacggcccctctccatttctccgcatcaccctggcgctaccccgccttgtggcaccagcccgccgcctcctggaacagggtatccgtgtgccaggcctgggtaccccaagcttcgcaccctatgaggccaacgtggactttgagatccggttcatggtggatgctgacatcgtgggctgcaactggttggagctcccagctgggaagtatgtttggaggacagagaagaaggctacacagtgccagctggaggtggatgtgtnnnnnnnnnnnnnnnnnnnnnnnnnnnnnnnnnnnnnnnnnnnnngtattgcgccccttcgtgtacttagctttgacatcgagtgtgctggccgcaaaggcatcttccctgagccggagcgtgaccctgtgatccagatctgttctctggggctgcggtggggagaaccagagccgttcttgcgcytggcactcacactgaggccctgtgcacccatccttggtgccaaagtgcagagctatgagcgggaagaagacctgctccaggcctggcccaacttcatccttgccatggatyctgatgtgataactggctataatattcagaactttgacctcccatacctcatctcgcgcgcgcaaaccctgaaggtggaccgcttccctttcctgggccgwgtgactggtctccgctccaacatccgagaytcctccttccagtcgaggcaggtgggccggcgggacagtaaggtggtcagcatggtgggtcgagttcagatggacatgctgcaggtgctgctgcgggagcacaagctgcgctcctacaccctgaatgctgtcagcttccacttcctgggtgagcagaaggaggacgtgcagcacagcatcatcaccgacctgcagaacgggaatgagcagacacgccgccgcctggccgtgtactgcctgagggacgccttcctgccacttcggctgcttgagcgccttatggtgctggtgaacaatgtagaaatggcgcgtgtcacgggtgtgccccttggatacctgctcagccggggccaacaggtcaaggtcgtgtctcagctgctgcgccaggccatgcgccaggggctcctgatgcctgtggtgaagactgagggcggtgaggactacacgggagccactgtcattgagccccttaaagggnnnnnnnnnnnnnnnnnnnnnnnnnnnnnnnnnnnnnnnnnnnnnnnnnnnnnnnnnnnnnnncataatctgtgctacaccacactgctacggcccggggctgcccagaagttgggccttaaaccagatgagttcatcaagacacccactggagatgagtttgtgaagtcatctgtgcggaagggcctcctgccccagatcctggagaatctgctgagtgcccggaagagggccaaggctgagctggctcaggagacagaccccttgcggcggcaggtcttggatggacggcagctagcactgaaagtgagtgccaactctgtgtatggcttcactggtgccgaggtgggcaagctgccatgtttggagatctctcagagtgtcactgggttcgggcggcagatgattgagaaaaccaagcaactagtggagtccaagtacaccctggaaaatggctacaatgccaatgccaaggtggtctatggtgacactgactctgtgatgtgccgatttggtgtctcctctgtggctgaggcaatgtctctgggtcgagaggctgcaaaytgggtatctagtcacttcccatcacccatccgactggagtttgagaaggtttacttcccatacctgctcatcagcaagaagcgctatgctggcctgctcttctcctcccagcctgatacccatgacagaatggactgcaagggcctggaggctgtgcgcagggacaactgtcccctggtggccaaccttgttacatcctctctgcgacgaatccttgtggaccgggatcccgatggggcagtggcccatgcaaaggatgtgatctcagacctgctgtgtaaccgcatagacatctcccagctggtcatcaccaaggagctgacccgagcagccgcagactatgctggcaagcaggctcatgtggaactggctgagaggatgaggaagcgtgaccccggcagtgcgcccagcttgggtgaccgcgtcccctatgtgatcatcggtgctgccaaaggcgtggctgcctacatgaagtcggaggaccccctgtttgtgctggaacacagcctgcccatcgacactcaatactacctggggcagcagctggccaagccactgctgcgaatttttgagcccattctgggtgagggccgtgcagagtctgtgctgctccgaggagaccacacacgctgcaaaaccgtgctcaccagcaaggttggtggcctcctagccttcaccaagcgccgcaactgttgcattggctgccgctcagtgatcaaccatcagggagctgtgtgtgaattctgtcagccccgggagtcrgagctctatcagaaggaggtgtcacacctgaatgccttggaggaacgcttctcgcgcctctggacacagtgccagcgttgccagggcagcttgcatgaggacgtcatctgcaccagccgcgactgtcccatcttctacatgcgcaaaaaagtgcgcaaggacctggaggaccaggagcggctgctgcagcgttttggacctccgggcccmgaggcctggtgactcgacgagggacacggaataaagttcagacttttt

SEQ ID NO: 3453 - DNA, 2449 bp, Cricetinae gen. sp.
  misc_feature (1894)..(1912): n is a, c, g, or t
ctaggtcagaccagacatcctgtcacgatgtcctgaaataaataccagccatctcgatgaacaacaggttcaacttctggcagagatgtgtattcttattgatgaaaatgacaataaaatcggggctgacaccaagaaaaattgtcacctgaatgaaaacattgacaaaggattattacatcgagcttttagtgtcttcttgtttaatactgaaaataagctcctgttacagcagagatcagatgctaaaattacctttccaggttgtttcaccaatagttgctgtagtcatccattaagtaatccaggagagcttgaagaaaatgatgccattggtgtaaaacgagctgcacagaggcgcttaaaagctgaattgggaatacccttagaagasgttgatccaaatgaaatgcattatctaacacgaatttactacaaggcccaatctgatggtatctggggtgaacatgaaattgattatattttgtttctgaagaagaacgtaaccttgaatccggatcccaatgagattaaaagctattgctatgtatcaaaggaagaactcaaagaacttgtgaagaaagcagccagtggtgaagttaaattaactccgtggtttaaaattattgtagacacttttctctttaaatggtgggataacttaaaccatttgagtcagtttgttgaccacgagaaaatacacagaatgtgatgtgaatgtgtgtatgaattgaagatttttctacctagttagaatgttttgttgttttcttttgaactgtgctcccttgtatgatacataggtattttacaaccagaattcgtttgagaaaaacttaaaagttttatagtatatatgcactgatatttgtaaaagacatttatgaagaggttattgcaaaattataccacaaataaaacttaatttaacctgtccaaatacatgactgtgacaagattgaagaagtgagtagggctcttcatttttttacattttgacaaacatcttcagaatactttgctatttgccaagtgttctttataccattaaattttatatacgccagaaaaatgagtaaaagagactgcttagctgsttcaaaacagcagtaatagattaaatggtcaaggctggggatacgctcagtggtaccatgattgccttgtaggcatgaggtcatgggttgttgattccctagtccttaaaataattatagcwrtrayrgwtaacaggtaggtccaagggagagtacgtggtatctaatcatcccttatgcttcargacccacttcataaccagaactctggatgctcaagtcttgtacaagattgtrtttgacctatgcacatctttcatgctggattgcttgtagcactgaacacagwgtaaatgctaacataaatgattattatactgtgctttgtggtaagtaaaagtkcatattcagtacagatcaaatattaatatgcagktggtttgaacctttgggtgccttggcccacagatktgaaagggcagktctatatgctaatttttgtcatttttcgttgattttgtgctttaaccattctaagatgttttactacttaactgttacttttagtggtaatggtaactggttaactcttttaaatagttatttaccacttagcaaaatctgttcataattatagtggaagagatgttagtcataaggtgagagtgagttgggaagttacaagagttgggaaaacttttagcactaccagtcctgggcctggataatcttgtagggtctgacctgggttggatgtttaagtagaatctctgcaccctgtacactcagtatcatttagcgcccctttgctaagacaaccaccaccaaaaaatggggggtgggttgggttttgaggnnnnnnnnnnnnnnnnnnncctggctcttcttgaactcactctgtagactagtctagccctggaactcaggatctacctgcttctgtcttccaagtgctaggattaaaggaacggactaccatacccagcaataaccagaattttaatgcatgataccaagtgtccaataggggcagagatacctctagttgagaaccactcactgttctgtagtcagggcttactttagaggtggaaacacaagggaatagcagtgagaaagtttaggatgagtgtgatgaataggcatatattataaggagattttgatgttatagattaggcatatattgagattgtgtcttgattgatgaactttttaaaacttgctacaggtgtgtcaaatttgagatcttaagacagctttagacttaaatgctgtgtaatgaataattttttcttataaaaattttgtaaattttgttaatttcttgataactcaaaagtttatttatttatcttcgaagatacaactatgtagcaagtatttattgaaaattaaaaataaactatttt

SEQ ID NO: 3454 - DNA, 3384 bp, Cricetulus griseus
  misc_feature (58)..(76): n is a, c, g, or t
  misc_feature (527)..(552): n is a, c, g, or t
  misc_feature (741)..(762): n is a, c, g, or t
  misc_feature (2000)..(2015): n is a, c, g, or t
  misc_feature (2815)..(2832): n is a, c, g, or t
  misc_feature (3268)..(3268): n is a, c, g, or t
atggcggaggcctcggagaggctttaccgggtggagtacgctaagagcgggcgcgccnnnnnnnnnnnnnnnnnnnagagtatccccaaggactcgctccgcatggccatcatggtgcagtcacccatgtttgacggaaaggtcccacactggtaccacttctcctgcttctggaaggtgggccactccatccggcagcctgacgttgaggtggacggattctctgaacttcggtgggatgaccagcagaaggtcaagaagacagcagaggctgggggcgtggcaggcaaaggccaggacggaagtggcggcaagtcagagaagacgctgggtgactttgcagcggagtatgccaagtccaacaggagcacatgcaagggctgtatggagaagatagaaaagggccaggtgcgcctctccaagaaaatgctggacccggagaagccacaactgggtatgattgaccgctggtaccatccaacttgctttgtcaagaaccgggaggagctgggcttccggcctgagtnnnnnnnnnnnnnnnnnnnnnnnnnnagcctcctctctgcggaggacaaagaagtcctgaagaagcagctcccaggagtcaagagtgaaggaaaaagaaaaggtgatgaggtggatggagcagatgaggtggccaaaaagaaatctaagaagggaaaggacaaggacagtaagctggaaaaggccctcaaggcccagaatgacctgatctggaannnnnnnnnnnnnnnnnnnnnngcatgttccaccagtgacctaaaggagttgcttatcttcaaccagcagcaagtaccatctggagagtctgcgatcttggaccgagttgctgatggcatggcgtttggggccctcctgccctgcaaggagtgttcaggccagctggtctttaagagtgatgcttactactgcactggggatgtcactgcctggaccaagtgcatggtcaagacacagactcccagccgaaaggaatgggtgacaccaaaggaattccgagaaatatcctacctcaagaaattaaaggtcaaaaaacaagaccggatattccctccagagaccagtgccccagcgccgccgcacctgccaccctctgtcacctccgcacccacggctgtgaactcctcttgcccagcagataagcccctgtctaacatgaagatcctgactctcggtaaactctctcagagcaaagatgaagcaaaggccacgattgagaaactcgggggcaagttgacgggatcagccaacaacgcttccttgtgtatcagcactaaaaaggaggtggaaaagatgggtaagaagatggaggaagtgcaagcagccaacgtgagggttgtgtgtgaggacttcctccaggacgtggctgcctccactaagagtctccaagagctgctctccgcccacagcttatcctcttggggggctgaggtgaaggtcgagcctgttgaagtggcggcccccaaggggaagtcagctgcaccctccaagaagagcaagggcctgtacaaggaggaaggtgtcaacaagtctgaaaagaggatgaaactaactctaaagggaggagcggctgttgatcctgactctggtctggaacactctgcacacgtcctggagaaaggcgggaaggtgttcagtgccacacttggcctggtggacattgtgaaagggaccaactcctattacaagctgcagcttctggaggatgacaaggagagcagatactggatcttccggtcctggggccgagtgggcactgtcattggcagtaacaaacttgagcagatgccatccaaagaggatgctgttgagcacttcatgaaactatatgaagagaagactggcaatgcctggcactcaaagaacttcacaaagtatcccaaaaagttctaccctctggagattgactatggccaggatgaagaggctgtaaagaagctgacggtaaaacctggcactaagtcaaagctcccgaaggnnnnnnnnnnnnnnnncgggatgatctttgacgtggagagcatgaagaaggccttggtggaatacgagattgaccttcagaagatgcccttggggaagctgagcaaaaggcagatccaggccgcctactctatccttagtgaggtccagcaggcagtgtcccaaggcagcagtgactcccagatcctggatctttccaatcgattctacaccctaatcccccatgacttcggaatgaagaagcccccactcctgaacaatgcagacagcgtgcaggccaaggtggagatgctggacaacctcctggacatcgaggtggcctatagtcttctcaggggggggtctgatgacagcagtaaggaccccattgatgtcaactatgagaagctcaaaactgacattaaggtggttgaccgagactctgaggaagctgaggtcatcaggaagtatgttaagaacactcatgccaccacacacaatgcctatgacctggaagtgatggatatctttaagatagagcgtgagggagagagccagcgctacaaacccttcaagcagctgcacaatcggaggttactgtggcacgggtccaggaccaccaactttgctggcatcctgtcacagggtctgcggatagccccacctgaagcacctgtgacaggctacatgtttggaaaagggatctattttgctgacatggtgtccaaaagtgccaactactgccatacatctcagggagacccgattggcttgatactgttgggagaagtcgcccttggaaacatgtacgaactcaagcatgcgtcacatatcagcnnnnnnnnnnnnnnnnnncacagtgtcaaaggcttgggcaaaacgacccctgacccttcggccagcatcaccctggagggtgtasaggttccactggggacagggatcccatcgggtgttaatgacacctgcctactatataacgagtacatcgtctatgacattgctcargtgaacctgaaatacctgctgaaactgaagtttaattttaagacatccctgtggtgaagtgygaggggtgtgctgcacccakcacccaagcctakgggtaaacttccccctggtgcctccacaccacagacaccacaaaacctcagccacaccgctgcctaatggtggcaccctcacccgatctccttagggttctatatagacaggttaaagggctctgggttcaagtcccttgtccgtgttgcactcggtgggagggttgttaggggttttatcctaccangcatagccctgatagacacggctgacagtagarggaaagttggggagargtttttgttttgtttgcctagactagtcttgagggggaaaagccacgtcacagccacaatgtctgcc

SEQ ID NO: 3455 - DNA, 1001 bp, Cricetulus griseus
attggtagtcgctccctgcgggtcctcgctgccacttctgcatcgcgagccgggagaccttcgcggccggccctctctcctgtcacagtctctagtatctagtcgtcgcgactccgccassatgttygaggcwcgcctggttcagggctccatcctgaagaaggtgttggaggctctcaaagacctcatcaacgaggcctgctgggacatcagctcgggcggcgtgaacctgcagagcatggactcgtcgcacgtctccttggtgcagctcactctgcgctccgaaggcttcgacacataccgctgcgaccgcaacctagccatgggcgtgaacctcaccagcatgtccaaaatactaaaatgtgctggtaatgaagacatcattacactaagggctgaagataatgccgatactttagcactcgtatttgaagcaccaaatcaagagaaagtttcagactatgaaatgaagttaatggacttggatgttgagcaacttggaatccctgaacaggagtacagctgtgtggtaaagatgccttctggtgaatttgcgcgcatatgccgagaccttagccatattggagatgctgttgtaatatcctgtgcaaaggatggggtgaagttttctgcaagtggagagcttggaaatggaaacattaagttgtcacaaacaagtaatgttgataaagaggaggaagctgtaaccatagaaatgaatgagccagttcagctaacttttgcactaaggtacctgaactttttcacaaaagctactccactgtctcctacagtaacactcagtatgtctacagatgtaccccttgttgtagagtataaaatttctgacatgggacacttaaagtattatttggctcccaagattgaagatgaagaaggatcttaggcgttgctagaatctgagaaaaccaagcctttgagaactgcttctgagatgccagcatgttttgaagtcttttctgtcaccaagtttgtacctg

SEQ ID NO: 3456 - DNA, 882 bp, Cricetulus sp.
  misc_feature (211)..(267): n is a, c, g, or t
  misc_feature (291)..(348): n is a, c, g, or t
  misc_feature (372)..(427): n is a, c, g, or t
  misc_feature (461)..(494): n is a, c, g, or t
aatgttagagaccttatatctccacaatgacatgccacaactmgacacttctacrygmwccggataaaaaaaataaartatataacatgtgggggtcccaccccarckrraaatsycatttcwckwctyaagaaagggctaataatacccccctgaagaactttttggaaccaacaaacccctgggaacaaaaatgawcsammattwwtgnnnnnnnnnnnnnnnnnnnnnnnnnnnnnnnnnnnnnnnnnnnnnnnnnnnnnnnnnatttccacytgtcattatgacatnnnnnnnnnnnnnnnnnnnnnnnnnnnnnnnnnnnnnnnnnnnnnnnnnnnnnnnnnntaattactaagcaaataatagcannnnnnnnnnnnnnnnnnnnnnnnnnnnnnnnnnnnnnnnnnnnnnnnnnnnnnnntattggctcaacaaatctgctaggkctamtaccnnnnnnnnnnnnnnnnnnnnnnnnnnnnnnnnnnaacctargaatagctatcccacyatgagctggagctgtaatcttadggtttcgacataaaataaaagactcacttgctcactktctyccacaargaacccctattscacttatcccaatactagtaattattgaaacaawtagctkatttattcaacctatagccttagctgtacgtttaacagctaatatcaccgcaggacatctgctaatgcacttaattggaggagctacactagtcctaacctcaatcagcctaccaactgctataatcacmwttattatcttaattatattaactatcctagagttcgctgtagccttaattcaagcctatgtatttacactactagtaagcctatatctacatgataatacgtaatgaccca

SEQ ID NO: 3457 - DNA, 1373 bp, Cricetulus griseus
  misc_feature (972)..(987): n is a, c, g, or t
aaatatgacctacggaatcacccagcttccaagtcgtcgggcaagtccgtcaggctcccagcggaagtggctacaggcggggccgagaaaggcgcgatgacgttgcagtgatgcgggcgtagccgtctgtgagcgtttggcgggatttctgaaagtcgcgcgtccctgggcgaagtgcgtgcagacgggttcctgttcaaagccgtgttttccggaaacgcagctgggaaggctaaaatttgctcctgttcttcacagaagaccggacagaggagccggtgacggtggttcttgtggcgtgagcagacccggccgccaaaggagcgcgcggcccacggcggctgcggaccgtaatggctatgcagatgcagcttgaagcaaatgcagatacttcagtggaagaagaaagctttggtccacaacctatttcacggttagagcaatgtggcataagtgccaatgatgtgaagaaattagaagaagctggtttccatacggtggaggctgttgcttatgcaccaaagaaggaactcataaatattaagggaattagtgaagccaaagcagacaaaattctggctgaggccgctaaattagttccaatgggtttcaccactgcaactgaatttcaccaaaggcgttcagaaatcatacagattactactggctccaaagagcttgacaaactgcttcaaggtggaattgagactggatctatcacagagatgtttggagaattccgaactgggaagacacagatctgtcatacattggctgtaacatgccagcttcccattgatcgtggtggaggtgaaggaaaggccatgtacattgacaccgagggtacgtttaggccagaacggctgctagcagtggctgagaggtatggtctgtctggcagcgatgtcctagataatgtagcatatgctcgagggttcaacacagaccaccaaacccagctcctttatcaannnnnnnnnnnnnnnntagaatccagatatgcactgcttattgtagacagtgctactgccctctacagaacagactactcaggtcgaggagagctttcagccaggcaaatgcatttgkmcwsakktctgaggawgctkctsmgmcwkgcwratgmrtttggwgtwkcwgwggwwrtcaccaaccaggtagtagcccaagtggatggagcagccatgttcactgcagatcccaaaaaacccattggaggaaacatcattgcccatgcatcaacaaccaggctgtacctgaggaaaggaagaggggagaccagaatctgcaaagtctatgactctccctgtctccctgaagctgaagccatgtttgccattaatgcagatggagtaggagatgccaaggactga

SEQ ID NO: 3458 - DNA, 2659 bp, Cricetulus griseus
  misc_feature (117)..(161): n is a, c, g, or t
  misc_feature (196)..(214): n is a, c, g, or t
  misc_feature (217)..(250): n is a, c, g, or t
ccgtgttggctcatcactaaacatgggaggctaaagcagttggctgccgcgagttcgaagccagcctggctatgaagaccctgtttcagccgggcgttggtggcgcacgcctttagnnnnnnnnnnnnnnnnnnnnnnnnnnnnnnnnnnnnnnnnnnnnncagaccaagcgagctccaggacagcctccaaagcnnnnnnnnnnnnnnnnnnngannnnnnnnnnnnnnnnnnnnnnnnnnnnnnnnnnccgtgtttcaaaaagaagacgattccaattgtacagctagatcggaaacagcagtgttcagcgctcttccgaaacggtttccaccaattttgtcctcacagctccaccttagagtacttttcacaaagcgttcgttaagcacagcaacaacgcagaaagaatcctgactgtgtaactgcccctcccctccatttcttaccctccacccacagaatgatttgcccttacttgtcatggcgactatccagctttgtgccagcagtctcgcgaggaatgctgggatagggactttcccctcccatgtgcttctactgactaaaaaaaamaaaagttttgtkcdgraktctaccatcctggctgcaggtagctattgggatcagggggymcctggsatccgggtccggaayctacttcccagcrgggtaacacgctyccccctgaagacctgaagyctggctgacttcytgrgtgctgccatggaggagccacagtcagacctcagcatcgagctccctctgagycaggagacattttcagacctgtggaaactacttcctccaaacaatgttctgtccaccttgccgtcmtcygattccattgaagarctgttcctgtcmgagaatgttrcaggctggytagaagacycaggtgragckctccaaggggtggcagcgccggcggctcctgcagcagaggaccctgtarctgagactcctgcaccggtggcctctgcrccagccactccctggcccctctcatcttctgtcccatcctataaaacctwccagggygactatggyttccgtctgggcttcctgcactcrgggacggccaaatctgtcacrtgcacgtactcmccttccctmaataagcwrttytgscagctggcraaaacatgcccygtscagctgtgggtcarctccacmyctccacctggcacccgtgtccgtgccatggccatctacaagaagytacaatacatgacrgaagttgtaagacgctgyccycaccacgagcgctcctccgarrgcgatrgtttggctcctcctcagcatcttatccgagtggaaggaaatwtgcatgccgartacctggatgacaagcaramwtttcggcacagtgtggtggtrccmtatgagccacctgaggttggctctgactgtaccaccatccaytayaactacatgtgyaatagttcctgcatggggggcatgaaccggcggccyatcctyaccatcatcacrctggargaccccagtggkaacctgctgggacggaacagctttgaggttcgtatttgtgcctgycctgggagagaccgtcgtacmgaggrmraaaatttccaraaraarggagaaccttgcccagarctrcccccaaagagtgctaaacgagcattgcctaccaacacaagctcctctccccmgccaaagaraaaaacacttgayggagaatatttcacccttaagatccgwggtsawgarcgcttcaagatgttycaagarytgaatgaggccttggaaytgaaggatgcwcaggcttyraaggsgtcagaggacartggtgctcactccagctacctgaagtccaagaagggccagtctgcctcccgtcttaaaaaactaatgatcaagagagaggggcctgactcggactgacytccttcctmkgcctcctgtsccccaycagcaacytcccawcccccwcctccttycctgmcattttgtcacttgggtgcttgaaccccrgcytgggtrgatctgtcatctctgwtatctggggagggtggtgggatacaccarkacaccakctyagcttttargattctgrccatgaggaaaggaagaaaattctcaataggtggkgtkrgaatttacaaytggccatgtgcarkgtgaggccccacccaaytctctaagaaagccatctgagtttactttctcctgacttgaaagccacatctrtaaaatgcagatgrgcatacctgcttctcagggtttsttgtgatacttgtgatacttgtcccttccrcaccwtttattaccttgtggcctggactcwgycccctctgtgagtsctggttcctggcccctrttgggkgrtrggttrsyagstsycwgststctgctggcccagcgaaatcctatccagccacttgwtggaccctggcacctaaaatgaaatttcaccccrccckaywcsctgtaagattctatcttgggctctcatrgggtccatawccaccaagacccattttctttccaccctgcactcrggatcagtttctttgaactctgcccagcctttctarcctttctgcatttaccrtccccccctctctttttataccatryccccttttatataccrattwcttattttacaataaaattttgttatcacytgtwa

SEQ ID NO: 3459 - DNA, 302 bp, Cricetulus griseus
cagccctacgcttttctccgtaattctgcagggtcgtcctggcaaccagttgctcagccaatcagcacttggtactacgatccgccctcaacatctggagcaatggcggtaagaagagccctgattgtattggcccattcagagaggacatcgttcaactacgccatgaaggaggctgctgtagagattctgaagaagaaaggatgggaggtggatgaatctgacctctatgctatgaactttaaccccatcatttccagaaaggatatcacaggtaagctgaaggacgcaaagaactttca

SEQ ID NO: 3460 - DNA, 578 bp, Cricetulus griseus
  misc_feature (414)..(456): n is a, c, g, or t
atatgcaaaaaatccagctgtcaactggaaacacaaagatgcagccatttaccttgtcacatctttggcatcgaaagcccaaacacaaaagcatggaatcacacaagccaatgaacttgtcaacctaactgaattttttgtgaatcacatacttcctgatttaaagtcaaataatggtgagttttgtgaaattgtttcttttctgtaacttgcagtgttatcccttgcatttttgctgcagtgatatggcagaagtcaagagctctgtgtgactgcagtgttcaaaggggcagtgatggtgtgatttcctcagcgcctgtctatggaaaattgacttgacaatacatttgtttttctttatctaagaagaaactagggataaggagacaaattggaactcagctttgttatccnnnnnnnnnnnnnnnnnnnnnnnnnnnnnnnnnnnnnnnnnnnatgtatacaacattctgtctccacgtatgcctacacgccagaagagggccccaggtctcattatggatggttgtgagccaccatgtggttgctgggaattaaattcaagacctctggaagag

SEQ ID NO: 3461 - DNA, 174 bp, Cricetulus griseus
  misc_feature (134)..(134): n is a, c, g, or t
cgagttggagcctgaagcccctgcgggtgatggtgataagaaaggcaatgcagagggtagcagtgatgaggaagggaaactggtcatcgacgagccagccaaggagaagaatgagaaggggatgctgaagaggnagaatgcaggggacattgctggagggactcccctaacgtc

SEQ ID NO: 3462 - DNA, 579 bp, Cricetulus griseus
caccctgaccattctagcagagaactctccaagattcttgcaaagctggagcgcttaaaacaacaaaatgaagacttgaggagaatggctgagtctctccgaataccagaaggccctattgatcaggggacagctacaggaagagtccgtgttttagaagaacagcttgttaaggccaaagaacagattgaaaattacaagaaacaagctaggaatgatctgggaaaggatcatgaaatcttaaggaggaggattgaaaatggagctaaagagctctggttttttctacaaagtgaattgaagaaattaaagaaattagaaggaaacgaactccaaagacatgcagatgaaattcttttggatttaggacatcatgaaaggtctatcatgacagatctatactacctcagtcaaacagatggagcaggtgagtggcgggaaaaagaagccaaagatctgacagagctggtccagcggagaataacatatctgcagaatcccaaggactgcagcaaagccagaaagctggtatgtaatatcaacaaaagctgtggctatggatgtcaactccatcatgtg

SEQ ID NO: 3463 - DNA, 579 bp, Cricetulus griseus
gatttcctttcagcctacagagaccccaggactggagaagagctcatcagaaatgagtactatgttactagagcttcagagcctgtgttctctgctgcaggagtctaaagaagaagccattggggccctgcagagaaaaatctgtgaattgcagactagactgcaggaccaagaggaagagcatcaggaagccctgaaggcaaaggaggcagacatagagaagctgaaccaggccttgtgcttatgctataagaatgaaaaggagctccaggaagtgatacagaagcagaacgagaagatcttagggcagatagacaagagtggtgagctcataagtctcaaggaggaggtgacccagctcacacgtttactgcggcatgcagagacagagacgaaagtgctccaggaagctctggagggccagctagaccccagctgtcagctgatggctactaactggatccaggaaaaagtctctctctcacaggaggtggacaagctgagggccatgttcctggagatgaaaaacgagaaagcaaaactggtgatcaagtatcagagccataggaacattcttga

SEQ ID NO: 3464 - DNA, 579 bp, Cricetulus griseus
ggaggcggaggcccggtgcgttcaagattcggcctcgcccgtagtccaccgccatggccgaggaaggcattgctgctggaggtgtaatggacgtcaacaccgcgcttcaggaggtgctgaagaccgccctcatccacgatggcctggcgcgcggcatccgcgaggccgccaaagccctagacaagtacgtgtctcggtctcagtgctgtgggttgctgcagccggagagggaaggaggcgtgaagttcatgctgttagcacaaaagttctgagtggcagccgttcagcaggaaacctaggaaaaggcgccaagcccatctctgtgtgctcgcatccaattgtgatgagcccatgtatgtcaagttggtggaggccctttgtgctgaacaccagatcaatctaattaaggttgatgacaacaagaaactaggggaatgggtaggcctctgtaaaattgatcgagaggggaagccacggaaagtggttggctgcagttgtgtagtggttaaggactatggcaaagaatctcaggccaaggatgtcatcgaagagtacttcaagtgcaagatatgaataaat

SEQ ID NO: 3465 - DNA, 503 bp, Cricetulus griseus
ggcacaagtctattgtgtctttccgccagctccgtgaggaggttctaggagagctatcaaatgtggagcaagcagctggtgtccgttggagtcgtttcccatacctcaatcgtctgctgaaggggcatcggaagggcgagctgacagtctttacaggacctacaggcagtggaaagacaacattcatcagtgagtatgccctggatttatgtacccaaggggtgaacacactgtggggtagctttgagatcagcaatgtgagactagcccgggtcatgctgactcagtttgctgtgacacggctggaagagcaactggacaagtatgaagagtgggcagatcgctttgaggacctgcctctctatttcatgactttccatggacaacagagtatcaggtctgtaatagacacaatgcaacatgctgtctacgtctatgacgtctgtcatgtagtcattgacaacttgcagttcatgatgggtcatgaacagttctctaccgac

SEQ ID NO: 3466 - DNA, 493 bp, Cricetulus griseus
aaggagctgagccgggagggcgcggtgtgcggtgaggctgacagcggtctccgttagatcgagtgatggcgcagcagctcgcccgagagcaaggcatcaccctgcgcgggagcgcggagatcgtggccgagtgggtttcgtttggcgtcaacagcattttgtatcagcgtggcatatacccgtcggaaacctttactcgagtgcagaaatacggactcaccttgcttgtaactactgaccccgagctcataaagtatctcaataatgtggtcgaacagctgaaagagtggctctacaagtgctctgttcagaagctggtggtggtcatctcaaatattgaaagtggtgaggtccttgaaagatggcagtttgatattgagtgtgacaagactgcaaaagaagatggtgtttgtggagaaaagtcacacaaagccattcaagatgaaatccgttcagtgatcaggcaaatcacagctaccgtgacctttctgcc

SEQ ID NO: 3467 - DNA, 581 bp, Cricetulus griseus
  misc_feature (120)..(142): n is a, c, g, or t
gtatatgaaatcctgcccaccttcgatgttctacatttcaagtctgaaggctacaacgacttgagcctctacaacctctttctggaagagaacataagtgagctcaaatcatacaagtgnnnnnnnnnnnnnnnnnnnnnnnaaagcgagggggcagggcatcgaccccatgctgctcctgaccaacctaggcatgatcaagatggacgtcatggatgggaagactcccatgtgctcagagatcaagggagaggaccagggcagccagatggtggagttcaaagatttggacctgagcagtgacactacaacaaacattggagagaagaactctcgacagagacttctgaattcatcatgctaatggtttcattcttgactttcaagtccgtgacttctgcggctgaagcacccctgttgggtctgtagctagtttgcagaaaatgttcttggtagtgatgtgatgtgtgttttaccaggccctaatagatataatggccaatagtgtacaggaagaatggattatgaatgtcccataagacaaaatattgaaatgagtaagtgggccttggcccgaagcc

SEQ ID NO: 3468 - DNA, 309 bp, Cricetulus griseus
  misc_feature (5)..(5): n is a, c, g, or t
  misc_feature (7)..(27): n is a, c, g, or t
  misc_feature (46)..(64): n is a, c, g, or t
  misc_feature (72)..(72): n is a, c, g, or t
  misc_feature (82)..(82): n is a, c, g, or t
  misc_feature (88)..(88): n is a, c, g, or t
cactntnnnnnnnnnnnnnnnnnnnnntcccccccttcgtagtcgnnnnnnnnnnnnnnnnnnntggtcggnacagccgggnacccanccagcgaccagtatgaagcactggcaaggtaacagcggtccttgcagaaacccgatgtcctgaccaccggtaggcgggtaacccaatagggagcataaacttaatatcatgactgctgggtcccgaggtaccccttctggttcaggatgtggttttcactgatgagatggcacattttgacagagtagcgaattcccgagagagtggtacatgcaaaagga

SEQ ID NO: 3469 - DNA, 579 bp, Cricetulus griseus
tgggtgcagcgtagcatctgggagaatggagacagcctggaagagctcatggaagaggttcaaaccttgtactactcagctgatcacaagctgcttgatgggaacccactagatggacaggctgaggtgtttggcagtgatgatgaccacattcagtttgtgcagaaaaagccaccccgtgagaatggccataagcagataagtggcagttccactggatgtctctcttctccaaatgcttcaatgcaaagtcctaagcatgagtggaaaatcgttgcttcagaaaagacttcaaataacacttacttatgcctggctgtgctggatggtacattttgtgtcattttcctccatgggcggaacagtccacagagctcgccaacaagtactccaaaactgagcaagagtttaagctttgagatgcagccagatgagctcctataaaagcccatgtctcccatgcagtatgcacggtctgggctagggacagcagagatgaatggcaaactcatagctgcaggtggttataacagagaggaatgtcttcgaacagttgaatgctatgatccacgtacagat

SEQ ID NO: 3470 - DNA, 497 bp, Cricetulus griseus
  misc_feature (39)..(51): n is a, c, g, or t
  misc_feature (53)..(77): n is a, c, g, or t
cgcacgaagatgcttcagacacagaaaatgccattgagnnnnnnnnnnnnngnnnnnnnnnnnnnnnnnnnnnnnnncttggaagttaaggaagaaaatggtgttttggtcttaaatgatgcaaactttgataactttgttgctgacaaagatacagtgctactggagttctatgcaccatggtgtggacattgcaagcagtttgctccagaatatgagaaaattgccagcactttgaaggataatgaccctcccattgctgttgctaagattgatgcaacctcagcatccatgctggccagtagatttgatgtgagtggttatcccaccatcaagatcctgaagaagggacaggctgttgactatgatggctccaggacccatgaagaaattgttgccaaagtcagagaagtttcccagcctgactggacacctccacctgaagtcacgcttctattgactaaagataactttgatgatgttgtgaataatgcaga

SEQ ID NO: 3471 - DNA, 520 bp, Cricetulus griseus
  misc_feature (10)..(54): n is a, c, g, or t
  misc_feature (379)..(379): n is a, c, g, or t
gttaattgcnnnnnnnnnnnnnnnnnnnnnnnnnnnnnnnnnnnnnnnnnnnnnttatacgctcaaattaacaacacatcccttgcggagttggaaaagcggttaaaagagacaccgtttgaccctcctaaagttgaaagtgcagaaagctttccaagctatgacacagcttctgagcagctgcatgaggcagggtatgatgcttacatcacaggactctgcttcatctccatggcaaattacctaagttctttactcggacctccaaaagtgtgtgtgtctgccagatcaaaactcattgaacccttttttaacaagttatttcttatgagggtcatggacattccatatttaaacttggaagggccagagcttacancctaaacgtgatcatgttctccacgtgacattccccaaagaatggaaaaccagggacctttaccagctcttcagcgcctttggtaacatccaaatatcctggattgatgacacatcaccctttgtttctctcagccagcca

SEQ ID NO: 3472 - DNA, 580 bp, Cricetulus griseus
ttatctggttctccgagctctggacaccgtggaagatgacatgagcatcagtgtggagaagaagatcccgatgctgcgcaactttcacactttcctctatgaacccgagtggcggttcacggagagcacacagaaggaccggcaagtgctggaggacttccccacgatctccttggagtttagaaatctggctgagaaatatcaaacagtgattgctgacatctgccagaaaatgggatgtgggatggcagaatttgtggacaagcatgtgacctccaaacaggactgggacaagtattgtcactacgttgctggactggtaggaattggcctttctcgtctgttctcgacctcagagtttgaagatcccttagttggtgaagacacagagtgtgccaattcaatgggtctattcctgcagaaaacaaatatcattcgtgattatctggaggaccaacaagaaggaagagcattttggcctcaagaggtgtggggcagatatgttaagaagctggaagactttgctaagccagaaaacatatatgtggccgtgcagggcttgaatgaactcataaccaac

SEQ ID NO: 3473 - DNA, 577 bp, Cricetulus griseus
tcggggctgggctttaatggctttgaagaaaatgggaaggcaaaatgggacgcgtgtgccaacatgaaagtgtggctctttgaaacaactcctcgattcaacggcaccatcgcctccttcaacatcaacaccaatgcctgggtagcccgttacatcttcaaacgcctcaagtttcttggaaataaagaactctcacaaggcctctccttactgttcttggccctctggcacggcctacactcaagatacctgatttgcttccagatggaattcctcattgttattgtggaaaagcaggtcaccagcctaatccaggagagccccaccctgagcagcctggcctccgtcactgccctgcagcccttctactacttggtgcagcagaccatccactggcttttcatgggttactccatgactgccttctgtctcttcacatgggacaaatggcttaaggtatacatgtctgtctacttccttggacatgtcttcttcttgagcctactattcatattgccttacattcacaaagcaatggtgccaagaaaagagaagttaaaaaaaagggaataataga

SEQ ID NO: 3474 - DNA, 579 bp, Cricetulus griseus
  misc_feature (408)..(444): n is a, c, g, or t
  misc_feature (482)..(515): n is a, c, g, or t
cattggaaaataattttaatcccagtataaacagggatgttggacaaagtgccaagaataatattgtaaagaataagagtttaccattttcccagtgtgaaagtccatccctagctgagttgtgtgaggagcacagagtaaacagtcccagccagtgctttactttgtccgatctgtataaccagtcatctgctaacttgggttcccttcccctgtcagaactggcaaaccgctctcagtcttctaatgcagtatcagagttaacaggatctctgtcatctttggcattttctgaagcttctcccacaagatacctggagaatttgtccctttcagatttgattgcataaacgattgaactagataactctcacattaagagagatgcctttgagctcagtttatctnnnnnnnnnnnnnnnnnnnnnnnnnnnnnnnnnnnnntcactgtcctgataaaaactccagagtttgttccaaannnnnnnnnnnnnnnnnnnnnnnnnnnnnnnnnngatactatcgttctaacctcaaagctaaggaaaaattgcagtccctactagggtagctagtaaa

SEQ ID NO: 3475 - DNA, 224 bp, Cricetulus griseus
ccctcattcccacccctcggctccacttcctcatgactggctatacccctctcaccacggaccagtcagtggccagtgtgaggaagacaaccgtcttggatgtcatgaggcgactgctacagcccaagaacgtgatggtgtccacaggccgggaccgtcagaccaaccactgctacatcgccatcctcaacatcatccagggggaggtggaccccacccaggtc

SEQ ID NO: 3476 - DNA, 581 bp, Cricetulus griseus
  misc_feature (309)..(309): n is a, c, g, or t
  misc_feature (448)..(448): n is a, c, g, or t
  misc_feature (508)..(508): n is a, c, g, or t
  misc_feature (524)..(524): n is a, c, g, or t
acatgtgagtgcactgacacagacacaggctgtggagggggagattgaactagccaagatgaagaagttcattgcttactgccgagcgaggtgtggccctcggctgtctgcaaaggcagcagagaaactgaagaaccgctatatcatcatgcggagtggggcccgtcagcacgagagggacagtgatcgccgttccagcatccccatcacagtgcggcagctggaggctattgtgcgcattgctgaggcccttagtaagatgaaactgcaaccctttgccaccgaggctgatgtggaggaggcactcangttattccaggtgtgcacactggatgctgctttgtctggcaatctgtcaggggcggagggcttcactacccatgaggaccaagagatgctgagccgtatcgagaagcaactcaagcgccgctttgccattggctcccangtgtctgaacacagcattgttcatgacttcaccaagcagaagtatccagagcatgccatnccgaaaggtgctgcanctcatgctgcgcaggggagaggtccaacaccgcatgcagcgcaaggtgctctaccgg

SEQ ID NO: 3477 - DNA, 334 bp, Cricetulus griseus
atccacagggatcgaggagggacacctggccgtgtactacaggggcggagccttactaactagccccagtggaccaggctatcatatcatgttgcctttcattactacgttcagatctgtgcagacaacactacaaaccgatgaagttaaaaatgtgccttgtggaacaagtggtggagtcatgatctatattgaccgaatagaagtggttaatatgttggctccttatgcagtgtttgacattgtgaggaactacactgcagattatgacaagactttaatcttcaataagatccaccatgagctgaaccagttttgcagtgcccacacactt

SEQ ID NO: 3478 - DNA, 600 bp, Cricetulus griseus
  misc_feature (27)..(65): n is a, c, g, or t
  misc_feature (403)..(419): n is a, c, g, or t
cactgagggcaatagtgctcccctaannnnnnnnnnnnnnnnnnnnnnnnnnnnnnnnnnnnnnntcgggtcgacccacgcgtgcgctcaaatatttcgcaatggaatgatgatgaagagagaatacaggggccagcgatcagtgaaagcgctcgcagactacatcaggcaacagaaaagtaacccagttcaagagattcaaagtatagatgaagtcaccactcttgatcgcagtaagagacatatcattggatactttgagcagaaggattcagataattacagagtttttgaaagagtagcaagtattttgcatgatgactgtgccttcctttctgcttttggagatgtttcaaaaccagaaaggtacagtggagacaatttaatctacaaaccaccaggnnnnnnnnnnnnnnnnntggtatacttgggatctatgacaaattttgatgtaacttacaactggattcaagacaaatgtgtccctctggtccgagaaataacatttgaaaatggagaggaattgacagaagaaggactgccttttctcatactcttccacatgaaagaggatacagaaagtttagaaacattccagaa

SEQ ID NO: 3479 - DNA, 494 bp, Cricetulus griseus
  misc_feature (373)..(393): n is a, c, g, or t
ccagccataaacattttgcaagaacagcctgactctaaaggtcccagcattcctttctcgatttttgatgagtttctttcagacgaaaaggacaaaagtcctgctgcagattctccacaggctctcaaagcccagcgaagaccccttgcagttctcaaaactgcagaaatcattgcctcaaatgaggacatgtctcctgatgtttgtgatgagcttacaggaattgatcctttgggtgaagatgccaccataccaagtttcaggaacgtaaccattggtcctaaccctgaggacacttgttactttgttagagcgcctcggtttgcatctactcctttccatgagataccgtccttgcagggcatcccttccnnnnnnnnnnnnnnnnnnnnngaagaggatctggatgggaagaccactgaggttcatcacactgcgctggccactatttataaccagaccctcagcatcaagaagctgagcccaattattga

SEQ ID NO: 3480 - DNA, 582 bp, Cricetulus griseus
  misc_feature (3)..(32): n is a, c, g, or t
tcnnnnnnnnnnnnnnnnnnnnnnnnnnnnnntgatgtggtttattgaaactgctagctttattgacgtggatgatgaaagatggcactactttctagtatttgagaagtataataaggatggagctacgctctttgcgaccgtagggtgcgtgacagtctataattactatgtgtacccagacaaaacccggccacgtgtaagtcagatgctgatactgactccatttcaaggtcagggccatggtgctcaacttcttgaaacagttcatagatactacattgcatctccttcagttcttgatataacagctgaagatccatccaaaagctatgtaaaactaagagactttgtgcttgtgaagctttgtcaagatttgccctgtttctcccgggaaagattaatgcaaggattcaatgaagatatggcaatacaagcacaacagaagttcaaaataaataagcaacatgctagacgtgtttatgaaattcttcgactgctggtaactgacatgagtgatgctgaacaatacagaagctacagactggacattaaaagaagactaattagcccttataagaa

SEQ ID NO: 3481 - DNA, 578 bp, Cricetulus griseus
  misc_feature (546)..(546): n is a, c, g, or t
tttggcctggaagcttttgcttgcatgggacatacctaccaagatgggtctgctcgtgcagaagtgtcccaggcctgcaacttcctcctgtcccagcagcatggcagatggaggctggggggaggactttgagtcttgtgagcagcggcgttatgtgcagagtgccaagtcccaggtccataatacgtgctgggccctgatgggcttgatggctgtcaggcatcccgacatcactgctcaagagagaggaatcagatgtctgttggagaagcagctctccaatggagactggcctcaggagaacatctctggggtcttcaacaagtcctgcgccatcagctacacaagttacaggaacatcttccccatctgggccctgggtcgcttctccaacctgtaccctgacaattccctcgctggccacctttgaatgcacatgcgtcagcctggatcatacagatccaggcaaggctgggggttcttggctagccctgccctatgccttgttctctatttctgtaaacatgaagctggggatagggtcanggttggtgtctttatgcacttggcagtgtaag

SEQ ID NO: 3482 - DNA, 327 bp, Cricetulus griseus
  misc_feature (97)..(138): n is a, c, g, or t
gtctacccacgcgtggggttggcccacttagggaagccctaactcacattgatcacagcttgagtcggcaacactgtccgttcctggttggggacannnnnnnnnnnnnnnnnnnnnnnnnnnnnnnnnnnnnnnnnncgttactgcatgacccaacttacctggcgggggaattgggtgccctgcagagctggttccagacactgagtacccaagagccatgtcagatagctgcagagactgtgctgaaacagcacggtgtcctggctctgcgcccctacctccaaaaacatccccagccccgccctcctgaggggagagctgcca

SEQ ID NO: 3483 - DNA, 581 bp, Cricetulus griseus
tcaaggaagatgtgtacccgaaaccacagcatcttcctggcagatataaatcaagagaggtgtgtcaatgagacctacaagaagaacctgatggccctcaacaagtttgtgatggtgaaattccttaacgattccattgtggatcctgtagactctgagtggtttggattttacagaagtggccaagctaaggaaaccattcccctccaggagagcactctatacacagaggaccgcctggggctaaagcaaatggacaaagcaggaaagctagtatttctggctaaggaaggggaccatcttcaactgtctaaagaatggtttaatgcctacatcataccttttcttaaatgaagcccttgcactttgcagcagagctcaagaaaccccagctcttccaaaaaaacacatcaacagctctccatgcccaaccctcaactctaatctagcttgcaagcagttctccactcctgttatctaacatgccctacttggaaagatctaagatctgaatcttatcctttgctgcctcctatcaccatatggtgttgaattcaaatttaattagctaataaccatgg

SEQ ID NO: 3484 - DNA, 578 bp, Cricetulus griseus
  misc_feature (377)..(377): n is a, c, g, or t
  misc_feature (577)..(577): n is a, c, g, or t
tgattatgaagttattcctaacagtaacttctatgtatctagaacagcctacagagataacacttctgtctattatataagtgggaagaagaggacatttaaagatgttggaaatcttcttagaagccatggaattgacttggaccataatcgatttttaatattgcagggtgaagtcgaacagattgctatgatgaaaccaaaaggccagactgaacatgatgagggtatgcttgagtatttagaagatataattggctgtggacggctaaatgaacctattaaagtcttatgtcggagagttgaactattaaatgaaaacagaggagaaaagttaaacagagttaaaatggtggaaaaggaaaaggatgccctanaaggagagaaaaacatagccattgagttccttaccctggaaaatgaaatatttaaaaaaaagaatcatgtctgtcaatattacatttatgatctacaaaaaagaattgctgaaatgaaaactcaaaaggaaaaaattcatgaagatactaaagaaatcactgagaagagcaatatgctttcaaatgaaatgaaagctaana

SEQ ID NO: 3485 - DNA, 578 bp, Cricetulus griseus
  misc_feature (537)..(537): n is a, c, g, or t
  misc_feature (576)..(576): n is a, c, g, or t
gaaatgtgtccctaaagtgcctcactgagattgctggtgtgagtgtaagccaatacgaggaacaatttgaaactctgtttacacttacaatgatgcagctaaagcagatgcttcctttaaatactaatattcgagttgcatactcaaatggaaaagatgatgaacagaactttattcaaaatctcagtctatttctctgcacctttctaaaggaacatggtcaacttttagaaaaaagactgaatctcaaggaagcactcatggaggctcttcattatatgttgttggtgtctgaggtcgaagaaactgaaatttttaaaatctgtcttgagtactggaatcatttggcagccgagctctatagagagagtccattttctacatctgcttctccattgttatctggaagtcagcattttgatattcctccaaggagacagctgtacctaactgtgttatcaaaggtccgtttattgatggttagtcgcatggctaaaccagaggaggtactggttgtagaaaatgatcagggagaangtgtaagagagttcatgaaggataccgattccataaatntg

SEQ ID NO: 3486 - DNA, 555 bp, Cricetulus griseus
gaaacttcaaaatcaagtgaatggtacagaatggtcatgagaaaaatttgaatacattgtgttgggcaataggctccattagtggtgcaatgcatgaagaagatgagaagcggtttcttgttactgttattaaggatcttttaggattatgtgagcagaaaagaggcaaagataataaagctataattgcatcgaatatcatgtacatagtaggtcaatacccaaggtttttgagagcacactggaaatttttgaagacagtagtaaacaagctgtttgaattcatgcatgagacccatgatggagtccaggacatggcttgtgacacattcattaaaatagcccaaaaatgccgcagacactttgtgcaggttcaagttggagaagtgatgccatttattgatgagattttaaacaacataaatactataatttgtgatcttcaacctcagcaggttcatacattttacgaagctgtgggatatatgataggtgcacagactgaccagacagttcaagagcatttgatagaaaaatacatgctacttcctaatc

SEQ ID NO: 3487 - DNA, 533 bp, Cricetulus griseus
  misc_feature (454)..(479): n is a, c, g, or t
atgcatcgttcggagtcagcgcgggccgctcgcatccccgggcgctggcagccgaggagatccgacagatgctggagggcaagccgctggcagacaagatgcgccccgacacgctgcaggactacatcgggcagagtagggccgtggggcaggagactctgctccgctcgctgctggagaccaacgagatcccttcggtcatcctgtggggcccgccaggctgcggcaagaccactttggctcacatcatagccaacaacagcaagaagcacagcataaggtttgtgacattgtctgcaacaaatgccaagaccaatgacgtgcgagatgtcataaagcaggctcagaatgaaaagagctttttcaaaaggaaaaccatcctttttattgatgagattcatcggttcaataaatctcagcaggacactttccttcctcacgtggaatgtgggannnnnnnnnnnnnnnnnnnnnnnnnngagaacccttccttccaggtcaatgctgctcttctaagccgatgtcgggtgatt

SEQ ID NO: 3488 - DNA, 579 bp, Cricetulus griseus
cggtggcgactgagaagaaaccatgcaggcatttctaaaaggcacatctgtcagcactaaaccacaattcaccaaggaccgggcaatacctacaggaagcagtggagaaaccaagaaagtcaagccagttccttgggtggaaaaatagtaagaattatccatatttttgttgaaataactaagtttcctccctaatcttttatagtccactggatttttgttttgttttaatgtaagggagatttgtggtatttagatgctactacctttggggggtacagtttgggggggtcttagatacagaaatgaaaacgtttctgtgagctggttataaatagtagtcctattgaaatctagattctggccctcttttattattgtatactggaaattgttggggttttgtttggttttagtatataaaaggtttgaagtagcactaaattgtcagctaagtgatactagacgtaattgtaaccattagctagatgtattctctgattatcgagggttttcaggttatttacaagccaaacaaggtcctaataaatgacttatgataaaagttactagctggca

SEQ ID NO: 3489 - DNA, 507 bp, Cricetulus griseus
tcttgacatgggctttgaagcaagcataaacacaatcctggagtttttgccaaagcagaggagaacaggccttttctcagccacgcagacacaggaagtggagaacttggtgagagcaggcctccggaaccctgtccgaatctctgtgaaggagaagggcgtggcagccaatagcacccagaagacaccatcccgcctggagaaccactacatgatatgtaaggcagatgagaaattcaatcagctggtccatttcctccggaaccatcagcaggagaagcacctggttttcttcagcacatgtgcatgtgtggaatactatggaaaggccctagaggtgctgttgaagagagtgaagaccctgtgcatccatggaaagatgaaatacaagcgcaataagatcttcatggagttccgaaagcttcagagtgggatcttggtgtgcactgacgtgatggcccgggggattgatattcctgaagtaaactgggtgttacagtacgaccc

SEQ ID NO: 3490 - DNA, 478 bp, Cricetulus griseus
  misc_feature (320)..(334): n is a, c, g, or t
gtcattttaataagctataatttttgaagaacttccttttttattagtttagaaagccccttatttttcacagaggggattttgtacacataaatgagttatttgtgctactttgacaaaaataatttttgtatgttgaaatgtttgtgcaccttcagtataaggtgtcatgtgcatctagccaatcagttaacagcagagcattcctgaggcttcttagtactgagtataattcaagagtccagggacatggcatccaaagggcatataaaagtctagattcatatttgaaccgtataatgtatttttctcttagtatnnnnnnnnnnnnnnnagtgtctcctaaggtaaccagatactgtataggcgggaaggaagggaaaggcaaagggaagtgaggcaggatgggaaggaggggtctagtctgatgatgatagtgtacatccacagtgtgatacgtagtgtgagttactgaaaa

SEQ ID NO: 3491 - DNA, 484 bp, Cricetulus griseus
atttggagcatcaactccactgtgctacagcagtgctgagatggttgcgatcctgctgctcctctgtcttcccttcatcttctgcctggccacaccaagaatcaggaaaatgctgtcttgtgggatgtgtacatctaatgtccagcttcctgggaaggtagccatagtcaccggtgctaacacaggcattgggaaggagactgctaaagacctggcccaaagaggagcccgtgtgtatttagcttgccgggatgtgcagaaaggggaacaggtggctagcgagatccaagccaccacagggaataatcaggtcttggtaaggaaactggacctagctgataccaagtctattcgagcctttgccaaagacttcttagctgaggaaaagcacctccacatcctaatcaacaatgcaggagtgatgatgtgcccctactccaagactgcagatggctttgagatgcacattggagtcaaccacttg

SEQ ID NO: 3492 - DNA, 523 bp, Cricetulus griseus
agctctgcagatctctgatgtggtcatggcctccctgttgcggatgttccaaagcacagctgggtctgggggagtgcaggaagatgccctgatggcagttagcacgctggtggaagtattgggtggtgaattcctcaagtacatggaggcctttaaaccattcctgggcattggattgaaaaattatgctgagtaccaggtgtgtttggcagctgttggcttatttggagacttgtgccgagccctgcagtctaacattttacctttctgtgatgaagtcatgcagctgctcctggagaacttggggaatgagaatgtccacaggtctgtgaagccacagattctgtctgtgtttggtgatattgctcttgccattggtggagagtttaaaaaatacctagaggtcgtattgaatactctgcagcaggcctcccaagcccaggtggacaagtcagactttgacatggtggattatctgaacgagttaagagaaagctgcttggaagcttatacaggaatcgtc

SEQ ID NO: 3493 - DNA, 528 bp, Cricetulus griseus
ggtacgtccacaggacactgtgtcagtaattggtggagtagctggaggcagcaagcaagggaggaaagctgcttggaaattcataaaggacaactgggaagagctttataatcgataccagggagggttcttaatatccagactaataaagctttctgttgagggttttgcgcttgataaaatggctggagaagttaaggctttcttcgagagtcatccagctccttcagctgagaggaccatccagcagtgttgtgaaaatatcttgctgaatgctgcttggctaaagcgagatgctgataacattcaagagtacctcctccagcggagagcctcccaaccctcagtgtgaagcctccgcccacctgcccacaccaagggcttgctgcctttctgcagggatgaggaggagctacccaacagctgattcacatgccaagaattggagtcttataccagtgggggttggacaatgaatgtagttaactggttcctgctcacactccagaattaaattctattgaaaaa

SEQ ID NO: 3494 - DNA, 561 bp, Cricetulus griseus
gcccaagcatactgagagccggcatggccgacaatcctgtgttggagctgttgttgcggcgactggaggcagcggatggcggcctggacagcgcggagttggctacgcagctgggcgtggagcaccaggtggtggtgggcgcagtgaagagcctgcaggctctgggtgaggtcattgaggctgagcttcgttccaccaagtgctgggagctgactactgagggtgaggagattgcccgggagggcagccatgaggcccgtgtgtttagaagcatccctctcgagggcctggtgcagagtgagctcatgcgactgcccagtggcaaggtgggcttcagcaaagccatgtccaacaagtggatccgagtggacaagaatacagctgatgggccccgggtgttccaagtggtggacagtatagaggatgaagtacagaggcggttgcagctggtccatgcaggccaggctgagaagctggctgaaaaggaaaggaatgagctccggaagaggaagctgctaactgaagtgaccctgaaaacctactgggtgagcaagggcaagg

SEQ ID NO: 3495 - DNA, 350 bp, Cricetulus griseus
tgtcactcgtgtctctgaagtcaaacctcggatggtggtggccacatatacttgtgatcagtgtggggcagagacttaccagccgatccagtctcccaccttcatgcctttgataatgtgtcccagccaggagtgccaaaccaaccgctcaggagggcggctttacctgcagactcgtggttccaaatttattaaattccaagaaatgaagattcaagaacatagtgatcaagttcctgtgggaaacatccctcgtagcatcacagtggttttacaaggagagaatacaaggactgccctgcctggtgaccatgtcagtgtcactggtatcttcttgccagtcctgcgta

SEQ ID NO: 3496 - DNA, 578 bp, Cricetulus griseus
cacgcagaggcggagtagagtttgtcccccactcacgcacgtggtgcccgagtctctcttctcgtcgcttgctgtgaagatgtcgcacccatccccgacagccaggccctccaaccccaagaacccgcgggtcttctttgacgtggacatcggcggggagcgagttggcagaattgttttagaattgtttgcagatattgttcccaaaactgcagaaaattttcgtgcgttgtgtacaggagaaaaaggcactggacccacaactgggaaacctctccattttaaaggatgtccttttcaccgaattattaagaagtttatgattcagggtggagacttctcaaatcagaatgggacaggtggagaaagtatttatggtgaaaaatttgaagatgaaaattttcattataagcatgatcgggagggtttgctgagcatggcaaatgcacgtcccaatacaaatggtgctcagttctttatcacaacagttccaactcctcatttggatggaaaacatgtggtatttggtcaagtaattaaaggactaagtgtagcaaggatgcttgaaaatgtcgaag

SEQ ID NO: 3497 - DNA, 561 bp, Cricetulus griseus
  misc_feature (506)..(506): n is a, c, g, or t
aagccgttgattttaggccgttctttcggccgagagtccccgcagcgatggcgagtcagtcgcaaggcatccagcagctgctgcaggccgagaagcgggcggccgagaaggtgtccgaggcccgcaagcggaagaaccggaggctgaagcaagccaaggaagaagcccaggctgagattgaacagtaccgcctgcagagagagaaggagttcaaggccaaggcagctgcggcactggggtcccacggcagttgtagcagtgaggtggagaaggagacccaggagaagatgaccgttctccagcactatttcgagcagaacagggatgaagtcctggataacctcctggcctttgtgtgtgacattcgtccagaaatccatgaaaactaccgaataaatggataggatgtggaagcacctgccctgtgggttggcatgggagatgccctcacagaataggaaacatccacagaactcgagttctgttctggaaggcattaaattatntctctatgctgttgtagattccttcactttttgagagtatcaaatctaacttttt

SEQ ID NO: 3498 - DNA, 402 bp, Cricetulus griseus
ggccggcttggtcactatggaggagataggcattttggtggagaaggttcaagatgagatcccagcactgtctgtgtctcggccccagaccggcctgtcctttctggggcctgaacctgaggacctggaggacctgtacagccgcgacaagaaactgcagcaagagctggagttcctggaggtccaggaggagtatatcaaagatgagcagaagaatctgaagaaagaattcctccatgcacaggaggaagtgaagcgaatccagagcattccattggtcattggtcagtttttggaggctgtggatcaaaacacagccattgtgggctctaccacaggttctaactattacgtgcgcatcctaagtaccattgaccgggaactgctcaagcccaatgcctc

SEQ ID NO: 3499 - DNA, 579 bp, Cricetulus griseus
  misc_feature (143)..(211): n is a, c, g, or t
tgggcatgttctaccgcaccatccgcatgatggagaatggcatcaagcctgtgtatgtctttgacggcaagccaccacagctgaagtcaggcgagctggccaaacgcagtgagaggcgagctgaagctgaaaagcagctgcannnnnnnnnnnnnnnnnnnnnnnnnnnnnnnnnnnnnnnnnnnnnnnnnnnnnnnnnnnnnnnnnnnnngcaacacaatgatgagtgcaaacacctgctgagtctcatgggcatcccgtaccttgacgcacccagtgaggcagaggccagctgcgctgccctggtgaaggctggcaaagtttatgccgcagccaccgaggacatggactgcctcacttttggcagccctgtactaatgcgacatctgactgccagtgaggccaagaagctgcccatccaagagttccacctgagccgcgtcctgcaggagctgggtctgaaccaggagcagtttgtagatctctgcatcctgctgggtagtgactactgtgagagtatccggggcatcgggcccaagcgggctgtggacctcatccagaagcataagagcatcgagg

SEQ ID NO: 3500 - DNA, 382 bp, Cricetulus griseus
agcgagcgcccgtagcctccccgcccctcctgcaacgcacgaccccgggatcccccaacccctcccggctcgcccgccgccatggctgacaaggaagctgcctttgacgacgcggtggaagagcgtgtgatcaatgaggaatacaaaatatggaagaagaataccccttttctttatgatttggtgatgacccatgccctggagtggcccagtttaactgcccagtggcttccaaatgtaaccaggcctgaaggaaaagacttcagcattcaccggcttgtcctgggaacacatacgtcagatgaacaaaaccacctggtgatagccagtgtccagcttccgaacgatgatgctcagtttgacgcatctcactatgacagtg

SEQ ID NO: 3501 - DNA, 537 bp, Cricetulus griseus
gaaggcagcttttctttttctgaggaaaaaaataggcatgggctacaggaatatttaaaatgtctcatttacagtataaagttcaaaggtagatgtaattcttacacctttaagtatttgtctgatttctgtctcttcctgaccattgggtatcctttatatgtaaataagataaggtaatcagatagccttattcagtctttatcattttcattcatcagattgttcctgtgtagattggacatttattgtagcactacataactgattttaaatctgtaaatgaattagcactttcatattgaaacaagcctgctagcctatgtataaaagcaaaactgtttgctgtttataaaaagggatataatggggtggggggcaagggtaatttcaggttaattattaatttaaaaatgaactagcaattttgtatctggtgactttgtggtgcactcacctctggtagtgacttgaattcggtatgtaaaaaggggttagtgatgtttcattgctgctaaaaatggcaactccctctgt

SEQ ID NO: 3502 - DNA, 502 bp, Cricetulus griseus
ggccgggcggttgggccgtgaagggagagtcttttcggcgctgaggactggcgctgaggaggcggcggtggctcctggggcgtttgagcgggctcactcgagcccgcgggccgacgcggactcaggcccagccggcggaaccgccccggactccccgcgggcttttctagccgccatggaggacggtgtctacgagcccccagacttgactccggaggagcgcatggagctagagaacatccgacggcgtaagcaggagctgctggtggagatccagcgcctgcgagaggagctgagtgaagctatgagtgaggtggagggtctggaggccaatgagggcagtaagaccttgcagcggaaccggaagatggcaatgggcaggaagaagttcaacatggaccccaagaaggggatccaattcttggtagaacacgaacttctgcagaacacacctgaggaaattgcccgcttcctgtacaagggtgaggggctgaacaagaca

SEQ ID NO: 3503 - DNA, 168 bp, Cricetulus griseus
  misc_feature (93)..(108): n is a, c, g, or t
catgttgaaagtaagcaatcattttgtggttgattacttgaagtgagtaaaaattgtgcctttatctactggtaagttttttttttatttttnnnnnnnnnnnnnnnntaactgaaaaaactatcatttcctgatagtaatattcctctttgttaaaaaaaaaaaaac

SEQ ID NO: 3504 - DNA, 519 bp, Cricetulus griseus
ctcggatccgcttccatccgatcctacagaaactcgtgtggttcctccccgcgacagccaaaatggtgaagctgatcgagagcaaggaagcttttcaggaggccctggcggctgcgggagacaaacttgtagttgtggacttctcagccacatggtgtggaccatgcaaaatgatcaagcccttctttcattccctctgtgaaaaatattccagtgtcgtgttccttgaagtagatgtggatgactgccaggatgttgctgcagagtgtgaagtcaaatgcatgccaaccttccagttttataaaaagggtcaaaaggtgggtgaattctcaggcgctaacaaggaaaagcttgaagcctctattactgagtttgcctaatcatggcctggaaaacataaccagccaccagctgtttaaagcctgtaacttttttaattttcaaaaaaatatgaagtgtggagaacctgtacccaactgccatctgattataaatgacaataaaatattaattctaccc

SEQ ID NO: 3505 - DNA, 524 bp, Cricetulus griseus
tgaaagcggtgtaccgaactgctttggccctgcaggtaggttccctgtgctggcagctggacatccgcgagtgggaggacctgcgagcgatcgcgagggatccttgtctgccaggaggtggaagaacatcctccgcacaggttcaacatttggactcatctgatgacagctcctgactccaagtgactgacatacacctgttgtttcttgggtaacataccaggggctgcgatggacctggttctcaatgttgccgatcactacttctttactccatatgtgtatccagccacgtggccagaggacaacatcgtccgacaaactattagtctcctgattgtcacgaacctgggtgcttatatcctctacttcttctgtgcaaccctgagctattattttgtctatgatcattcattaatgaagcatcctcagtttttatagaatcaagtctctcgagagatcatgttcacggttaagtctttgccctggataacgatccctaccatttcattgttcctgctgga

SEQ ID NO: 3506 - DNA, 579 bp, Cricetulus griseus
tgtgacccatgaagacttccaagttacagaggaagtgaaggccctgaccgcggagattgtgaagaccattcgggatatcattgccctgaaccctctgtacagagagtcggtgttgcagatgatgcaggcaggccagcgggtagtggacaaccccatctacctgagtgacatgggcgctgcactcacgggggctgagtcccatgagctgcaggatgtgctggaagagaccaatatacttaagcggctctacaaggccctatcactcttgaagaaggagtttgagttgagcaagcttcagcaacgcctgggccgagaggtagaagagaagatcaagcagacgcacaggaagtacctgctgcaggaacagcttaagatcatcaagaaggagctgggactggagaaggatgacaaagatgccatcgaggagaaattccgggagcgcctcatggagcttgtggtccctaagcatgtaatggatgtggtggatgaggagctaagcaagcttgcactgctagacaaccactcctctgagttcaatgtcacccgcaactacctggactggctgacatccatcccatg

SEQ ID NO: 3507 - DNA, 507 bp, Cricetulus griseus
  misc_feature (468)..(495): n is a, c, g, or t
atcagatatcagctttgacaagactgatgaatcactggagccaagaactgagacagacaattcaggcacacctcacaataatggaggcatgcgcctacatgactttgtctcaaagacggttataaagcctgaatcttgtgttccctgtggaaagcgcatcaaatttggcaagctgtctctcaaatgtcgagactgccgtttggtctctcatccagaatgtcgggatcgatgtccccttccctgcatttctcccctggtgggaactccagttaagattggagagggaatgttggcagattttgtgtcccagacttctccaatgattcctgctattgttgtcagctgtgtgaatgagatagagcagcgaggcctgactgaggcaggcttatacaggatctcaggctgtgaccgaacagtaaaagagctgaaagagagattcctcaaagtgaaaactgtacccctcctcannnnnnnnnnnnnnnnnnnnnnnnnnnntagcctcctgaa

SEQ ID NO: 3508 - DNA, 509 bp, Cricetulus griseus
ggatacctgtctttcctggtaccatcttccttagtagatcatttatatctcttgcctgatgagcaccttttgacagaggatgaaacaaccatatcagatgatgctgatgtggcccgggatgtcatatgtcttataaaatgcctccggatgattggagagtcagttaccatggatatggcagttttgatggaaaccagttgttacaacttacagtctccagaaaaggctgcagagcaaattttggaagatttgatcactattgatgtagaaaatgtgatggaagacatttgtagtaaactgcaagagatcagaaaccctgtccatgccattggacttcttatacgggaaatggattatgaaacagaagtcgaaatggaaaagggatttgatccagctcaacctttgaatgttcgaatgaatctttcccagctctatggtagtagcacagcagggtatattgcgtgcagaggtgtgtataaaattgccagcactcgtttcctgatctgccg

SEQ ID NO: 3509 - DNA, 476 bp, Cricetulus griseus
cggacgacgtagatcagcaacagactaccaataccgtagaggagcccctggatctcatcaggctcagtttggatgagcgaatttatgtgaagatgagaaacgaccgagagcttcgaggcagattacatgcttatgatcaacatttaaatatgatcctgggagacgtagaagaaactgtgacgacgatagagattgatgaagagacatatgaagagatatataaatcaacaaaacggaacatccccatgctcttcgtccggggagatggtgttgttctagttgcccctccgttgagagtcggctgagacagaaaatggtcctgtgtaggaaaatggagactttgcctcttgagatgtacagaacactcacagagagaagctcatgtgtattctgatagtcagaaatgacccgaggatccctccaccctcaaagaagttcatttgcgagtaacttacaacctctccagctaaaatggc

SEQ ID NO: 3510 - DNA, 557 bp, Cricetulus griseus
cagtgggaggcatccgtgcttctctgtataatgctgtcacaactgaagacgttgagaagctggctgccttcatgaagaattttttggagatgcatcagctgtgaacatgactagctatgctctgcctgtgagcagcacgcagagttcagaataacttctggttggctacaaaaacttaacagacatggatttttttcccccaaacacatgcttgttacagattctttttgaaagaataatgactaaacatccagggctctgcagggcggatgagactaccagcttatgaccaccttcattttgacttgacctggaagcagtttcaaagctttcctgttgcttttctaacgaatccagcctggcatgtctctgcccctgtctctaggtggattgcagtcctagccttggactttgttctgctgattccatttagttattttttgggttcacaggagcataccccaaggaggttggggtaccatgttctggatctgacagcagtgagtttgctgggttctgcagctattggttaaagtcaacagtgactcttaagcatt

SEQ ID NO: 3511 - DNA, 545 bp, Cricetulus griseus
tgccaaaaaagggtcagaactgaatgtaaatgtggggctgagacttgccgaggttacctcaactgaaacttaaagaaatggagcctcatgattgttttgttttgttctaagaactgaaaaagtatttgggatgcctttctatcatcaagattatatgtatatgttaatgtacaacttgtgtctcaaccaaagtacattactattgcttctgaagaggactgcagggccacataaatagaatgtatttggtggttacatactaaatatggaaagtgaactgtttccaaatcaccatacacttagttaagaaatctgaatagacaagtgtcccctttagtgtttgaaaagcaatgaggcaatggctgttactatgacaagcagataattcaatttaggtaaatgtacagattttatttttttttactctattgttcctacttaatactcactgatcttgtatttgagacaaataggcggcactgaatatttttactatattttctacttttgcattaaaacattggcatcttaatgatatatttcag

SEQ ID NO: 3512 - DNA, 445 bp, Cricetulus griseus
tgtgggggagggagaatgtcgcctgttcaccaagatccgaggccagttctcgtcgtggagtaatgagattgaggataatttccaaagtggttatgatgttttatataaagaagtctggaaatttgaaaagcaatatcgaggccgagagctgccagggtttgtgaactacaaaacatttgagaacatcataagacggcaaatcaaagtcctggaagagccagctgtagaaatgctgcacagggttactgaaatggttcgagatgcctttaccattgtttctgaaaaaaattttgatgagttttttaacctccacagaactaccaagtccaaacttgaagacctcagattagaacaagaaatggaagcagagaagatgatccgacttcactttcagatggagcagatcatctactgtcaggaccaagtttacagaggagccttgcag

SEQ ID NO: 3513 - DNA, 492 bp, Cricetulus griseus
  misc_feature (77)..(77): n is a, c, g, or t
tggcttcaaaattccagcacaacacccccaaaaccaataatcccaacggcaaggctgaatctcaaggacaatgggangccgggcctggagaagtggattggttctccctagccagtgtcatttttctgctgctctttgcaccattcattgtgtactacttcatcatggcatgtgaccagtacagctgctcgttgaccacccccatagtggacatagccaccggccgtgctagtctggcagacatctgggccaagacaccgcctgtgacagctaaagctgtccaactgtacaccttgtgggtcagcttccaggtggttctttactcctggcttcctgacttctgccatagatttttgccaggctatgtgggaggtgtccaagaaggtgccgtaactccagcaggggttgtaaacaagtatgaggtgaacgggctacaagcctggctcattactcacctcctctggtttttgaatgcttacctactatcctggt

SEQ ID NO: 3514 - DNA, 560 bp, Cricetulus griseus
  misc_feature (337)..(355): n is a, c, g, or t
  misc_feature (485)..(501): n is a, c, g, or t
ctatatcctcatggagaagattgaacctgagccttttgggaattgcctgctacggcctggcagccctgcccgagtggtccagtgtatctcagaactgggtatttttggagtctatgtcagacagggaacaacacttgtgatgaacaagcatgtggggcatctgcttcggaccaaagccactgaacatgcagatggaggtgtggccgcaagagtggcagtcctggacaacccctaccctgtatgagggcacatcctgcacttcactcaagagaccttctatcccctgtacttgacattcctctcctaattcctgagggctacccctgtctccaccttnnnnnnnnnnnnnnnnnnnatagacctccagggtcttcaaggaagggaaaatcctgggtaccttctctcagccttccatctgaggaccagaagagttatgcttccattagaagagttctggagatccccagatcttggagtgtggggannnnnnnnnnnnnnnnntaaaggccataagccctgcagatcttattaccctcttgtgagcctttccagcaggttct

SEQ ID NO: 3515 - DNA, 452 bp, Cricetulus griseus
gttccagaagattcaggacttgattgacgataaggaagctctggtgtttgtgctgatcgatgaggtggagagtctcacagctgctcgaaatgcttgcagggcaggtgcagagccatcagatgctatccgtgtggtcaatgctgtcttgactcaaattgatcagattaaaaggcgttccaatgtggtgattctcaccacatccaacatcactgagaagattgatgtggcttttgtggacagagctgacatcaagcaatacattgggcccccttctacagcagccatcttcagaatctacctctcttgtttagaagaactgatgaagtgccagatcatatatcctcgtcagcagctgctgaccctccgagagctggaaatgattggcttcattgaaaataacgtgtcaaagctaagcctccttttgagtgaaatttcaaggaagagcgagggcc

SEQ ID NO: 3516 - DNA, 294 bp, Cricetulus griseus
aaactattaactaaatctcaaagagaagccagagccagagctgaagtgacccttaaacacctccaggctcagggggttgaagtgccatcaaaagactcattgccaaagaaaaggcgccggggggagagataaaaagaagaggagaacaccacaacagccagaaaataaagaagtatctgaagctttggaaataagtgttcctgtggaagtcgtggagcaagtaataccagaaaaagaagagatactcccttctgtggaaccagaggaagaagaagaaactgaggacgctggctt

SEQ ID NO: 3517 - DNA, 86 bp, Cricetulus griseus
cctcggcctctggggccttgcggggactcatcccttcggcggcgctaccccaggcgcagctactgctgcgagccgctcccgccgcg

SEQ ID NO: 3518 - DNA, 116 bp, Cricetulus griseus
  misc_feature (34)..(67): n is a, c, g, or t
ttgtcagtgcacaaaatggcgccttacagcctcnnnnnnnnnnnnnnnnnnnnnnnnnnnnnnnnnnggcagtaccatgtggcctctgtcctgtgccaacgggccaaggtggccat

SEQ ID NO: 3519 - DNA, 264 bp, Cricetulus griseus
tgagatactggttgtgggtaagttgttgggggagtactacactggcttggagctggagtgatatgaggtgtatccagcgcgtcagctgtcatgctgacatcaaacataggggtctgtgagtcgacatccattgaaaaaagctctctctggagggggggtgcttccgtctggtgcttggatttgtcaagtggtactcttgatgacttcttcttcttggtcttgttgctccccgagcacatttccatccggggtgatccggaagag

SEQ ID NO: 3520 - DNA, 505 bp, Cricetulus griseus
caaatggcggtgttccgtttttccagcataaaaagccacatggaaaggacaaagaaaacagaggcattaacccagtggagaagtctaaagtggaagagacttcagagtactctgtcacaaaaagcagattgccacttcgagcctcaaatgtgtaattaatctgagggctaaggttttcttttcttaaaaagtaaaacctgaaacttcataatttgaacttttatacagatttcaatgggatagactatgtcaagacatcacagtaactagttgaattgagtcctttttaatcatccttatagtttaagcatgtagtaaatttggtttcatttggaatttatattatgtgtgtttctagcttatataaagtagctcttctgtaatgcgttgttttcttgtatattattaaataccaaatatatggaaattgttcttccaagcttggacttaaatggatgaatgtcatctcccttcctgtcttgctaggcctgagttctgtatgtat

SEQ ID NO: 3521 - DNA, 650 bp, Cricetulus griseus
  misc_feature (1)..(21): n is a, c, g, or t
nnnnnnnnnnnnnnnnnnnnngaggtggccagtctggtcactctccccagtgggcaggggtcactggggcccagctggtgagcagtccttggtaccaactgggacacctcagctcagcctgaggcaaagaggtatagggatatatcgctctcccagctttttttttttttaagtcaaattcaaactaaccagcccagctcagggcctaaaattcacaaaggctaggggccgttttacagtcaccatggatcaccgcacccgtcaaagagggggtttaggccttattcgagtctctgggactcaaatccgaccccccagggtcccgtttccgttccatgttgaccaggaggctagggaaggaaaaaaatgggaacgagagctaccacgtcataggcctgtcatttacggaccctcaaaaagggaggagctacaggataatattatgatttctaagccagcaccttactgggaaggaacagctgtgataaatggagaattcaaggagctgaaactgactgactatcgggggaaatacttatttttcttcttctacccactcgatttcactttggtatgtccaactggaaatattgccttcggtgaccgaattgaagaattcagatctataaatactgaaggggggcatgctt

SEQ ID NO: 3522 - DNA, 651 bp, Cricetulus griseus
  misc_feature (1)..(21): n is a, c, g, or t
  misc_feature (375)..(401): n is a, c, g, or t
nnnnnnnnnnnnnnnnnnnnnactccgctgatgctaacgccaatgggaaagactggggaaggaactggagtgaccgctcaatattctctggcattgggtctactgctgagcccgtttctcagtctaccacttctgattatcagtgggatgttagccgtaatcatccctatatcgatgatgaatggtctgggttaaatggtttgtcttctgctgaccccagctcagactggaacgcaccagcagaggagtgggggaactgggtagatgaagaaagagcttcacttctgaagtcccaggaacccatccctaatgaccaaagggtttcagatgatgataaagaaaagggagagggagctcttgcaactggaaaatccnnnnnnnnnnnnnnnnnnnnnnnnnnngcaaggtgaagacaactctctcacacaggacacagaagagctagaaaaggacattagagaagaacttcccatgaatacctccaaagcccgtccaaaacaggagagagctttttccttgaaaacattaacactattgacccagatgaagcactggtcaaaaatagccagcctatcaagactcttccacctgctattctctaccgagccatctgtcaccttatcacatggtgactctgacaagagctcttcc

SEQ ID NO: 3523 - DNA, 650 bp, Cricetulus griseus
  misc_feature (1)..(21): n is a, c, g, or t
nnnnnnnnnnnnnnnnnnnnntaatgatgaagggaagatgttcatgaggccagggaaactgtccgactactttccaaaaccataccccaaccctgaggctgccagagctgctaacaatggagccttacccccggacctcagctacattgtgcgagctaggcatggtggtgaggactatgtattctccttgctcactggttactgtgagccccccactggggtgtcattgcgagaaggcctctacttcaacccttactttcctggccaggccattggtatggctcctcccatctacaatgaagtcttggagtatgatgatggtaccccagctaccatgtcacaaatagccaaggatgttgccaccttccttcgatgggcatcagagccagagcatgaccatcggaaacgaatggggctcaagatgttgttgataatgggcttgctgctgcccctgacctatgccatgaagcggcataaatggtcagttctgaagagtcgaaagctggcatatcggccacccaagtgaccctgtccagtgtctgcttgtcctcttgcctgaagaagccctcaacagcccaggaagtcctaggccttttcaggcctgctccttttcatccaatagaaggaaatggggtaggagaccaggctct

SEQ ID NO: 3524 - DNA, 864 bp, Cricetulus griseus
  misc_feature (17)..(35): n is a, c, g, or t
  misc_feature (62)..(114): n is a, c, g, or t
  misc_feature (118)..(139): n is a, c, g, or t
  misc_feature (142)..(164): n is a, c, g, or t
  misc_feature (171)..(194): n is a, c, g, or t
  misc_feature (197)..(220): n is a, c, g, or t
  misc_feature (223)..(249): n is a, c, g, or t
  misc_feature (279)..(325): n is a, c, g, or t
  misc_feature (337)..(355): n is a, c, g, or t
  misc_feature (363)..(368): n is a, c, g, or t
  misc_feature (401)..(424): n is a, c, g, or t
  misc_feature (434)..(456): n is a, c, g, or t
aatcctaggctacatannnnnnnnnnnnnnnnnnnacatcgtcggaccatatggcatcttannnnnnnnnnnnnnnnnnnnnnnnnnnnnnnnnnnnnnnnnnnnnnnnnnnnnagcnnnnnnnnnnnnnnnnnnnnnnttnnnnnnnnnnnnnnnnnnnnnnntagcgtnnnnnnnnnnnnnnnnnnnnnnnntannnnnnnnnnnnnnnnnnnnnnnntannnnnnnnnnnnnnnnnnnnnnnnnnncaagcctttctgtatattcaatcttatgannnnnnnnnnnnnnnnnnnnnnnnnnnnnnnnnnnnnnnnnnnnnnnagctgtagcacnnnnnnnnnnnnnnnnnnnaactatannnnnntattttactaaaaaaacctacgtgtaagggggnnnnnnnnnnnnnnnnnnnnnnnngccacacccnnnnnnnnnnnnnnnnnnnnnnngctcctggcactagccataatatgagttaggtttaccttagcatgaaacaaatmgagcycctttgygacctcwctgaargagaatmtgaactagtatytggatttaacgyasagtatgctgsaggcccattmgcrctattcttyatagctgaatatactaacatkaktctaataaatgccctatcaactattgtattcttaggsccrtacaakaatmtcaacacatccagaaatatwkactactaatkttatrcttawgacrctaatattaacctccctattcctatgaattcgagcatcctacccacgcactccgatgtgatcaactcatacacttactatgaaaaaactaactcccattaactttagccctatgtacgtgatatatttctatacctgaattcatag

SEQ ID NO: 3525 - DNA, 907 bp, Cricetulus griseus
  misc_feature (205)..(216): n is a, c, g, or t
  misc_feature (254)..(259): n is a, c, g, or t
  misc_feature (262)..(263): n is a, c, g, or t
  misc_feature (267)..(309): n is a, c, g, or t
  misc_feature (345)..(390): n is a, c, g, or t
  misc_feature (409)..(464): n is a, c, g, or t
  misc_feature (471)..(476): n is a, c, g, or t
  misc_feature (482)..(484): n is a, c, g, or t
  misc_feature (490)..(500): n is a, c, g, or t
  misc_feature (516)..(539): n is a, c, g, or t
  misc_feature (801)..(816): n is a, c, g, or t
gtcgacccacgcgggcrtgcatatcatatagtaaacccaagcccatgacccctcactggagctttctcagccctcttacytacctcaggattagtaatatgatttcactataactcatttactatcctttatattggcttactaaccaacatactaactatatatsratgakgacgagacattgtrcgagagggkdcaccccatnnnnnnnnnnnncccattgyacaaaaagggctycsatacgcggataattnnnnnnttnngtgnnnnnnnnnnnnnnnnnnnnnnnnnnnnnnnnnnnnnnnnnnnctccagcctaktacccacacatgacctagtggggannnnnnnnnnnnnnnnnnnnnnnnnnnnnnnnnnnnnnnnnnnnnncattattaaacacatcagnnnnnnnnnnnnnnnnnnnnnnnnnnnnnnnnnnnnnnnnnnnnnnnnnnnnnnnnargcgannnnnnataaannnaagcannnnnnnnnnnatcatcttardggtgnnnnnnnnnnnnnnnnnnnnnnnnagagtacttagaaacttctttttccatctcagacrgaayctatggatctacattctttatagcaacargttttcacggtctccatgtaatcattggaacatcattccttacagtatgcttattacgacaatttaaatttcactttacatcaaaacaccatttcggatttgaagccgcagcatggkactgacactttgtagatgttgtatgacttttcctttacgtatcaatctattgatgaggctcatamwwwmwgaaaaannnnnnnnnnnnnnnnccgcccccgggggggacccccagctttggtcccctttagaggggggaaatggcgccctgggggaaataagggccaaagctgttccctgggg

SEQ ID NO: 3526 - DNA, 1175 bp, Cricetulus griseus
  misc_feature (10)..(39): n is a, c, g, or t
  misc_feature (42)..(169): n is a, c, g, or t
  misc_feature (180)..(241): n is a, c, g, or t
  misc_feature (254)..(321): n is a, c, g, or t
  misc_feature (332)..(361): n is a, c, g, or t
  misc_feature (363)..(387): n is a, c, g, or t
  misc_feature (389)..(402): n is a, c, g, or t
taacttctannnnnnnnnnnnnnnnnnnnnnnnnnnnnnctnnnnnnnnnnnnnnnnnnnnnnnnnnnnnnnnnnnnnnnnnnnnnnnnnnnnnnnnnnnnnnnnnnnnnnnnnnnnnnnnnnnnnnnnnnnnnnnnnnnnnnnnnnnnnnnnnnnnnnnnnnnnnnnnaaaatttgatnnnnnnnnnnnnnnnnnnnnnnnnnnnnnnnnnnnnnnnnnnnnnnnnnnnnnnnnnnnnnntcctcatgatatnnnnnnnnnnnnnnnnnnnnnnnnnnnnnnnnnnnnnnnnnnnnnnnnnnnnnnnnnnnnnnnnnnnncttgacttctnnnnnnnnnnnnnnnnnnnnnnnnnnnnnntnnnnnnnnnnnnnnnnnnnnnnnnncnnnnnnnnnnnnnngatgacacggacgacaagacgcaaatactgcagccctacaggcaattttatataatcgcattggggacattggctttgttataacaatagcttgactatgcttaaataataattcctgagaatttcaacaaatctttatatcagaaaacaaaagcctcattcctttactaagcttwckwsymrcagcwmcrggaaaatctgcacartttggactacacccatgacttcrcctcagctatagaaggccctacaccagtctcagctctactacactstagcactatagtagtagcawraatctttytactaakccgctwscacccaataatctcaaataataacactgcycwtactatcatattatgtttaggttccataacaacactattcacagctaatctgtgccgctcacacaaaatgatattgaaaaaatcgtacccttctcaacatcaaaccaattaggcctaataatagtaacatgaggaattaaccaaccacacctagcctttctacacatactgtacacacgcattcttcaaagctatgttattcatatgctccggatcaattatccatagcctaaatgatgaacaagacattcgataaataggaggactattaaaaccactaccattcacctcatcatgcttgataattggaagcctagccctaacaggaataccattgctaacaagcgtttattcaaaggacttaatgatcgaagccgcatacacctgttgtacaaacggcctgacccctatgatttacactcg

SEQ ID NO: 3527 - DNA, 324 bp, Cricetulus griseus
  misc_feature (181)..(323): n is a, c, g, or t
tgaaatgcaactctgactattgtacagttaattcctcactgaggactccaaacattcctgtgtttcacgtgtactgaagaacactgttgtgtgatgcttggtgtaaagttattgtgaaaattttattgtctttatttttaccaaagatttcccatagttcgaagcatttgaagcaataaannnnnnnnnnnnnnnnnnnnnnnnnnnnnnnnnnnnnnnnnnnnnnnnnnnnnnnnnnnnnnnnnnnnnnnnnnnnnnnnnnnnnnnnnnnnnnnnnnnnnnnnnnnnnnnnnnnnnnnnnnnnnnnnnnnnnnnnnnnnnnna

SEQ ID NO: 3528 - DNA, 776 bp, Cricetulus griseus
  misc_feature (13)..(80): n is a, c, g, or t
  misc_feature (82)..(131): n is a, c, g, or t
  misc_feature (140)..(140): n is a, c, g, or t
  misc_feature (142)..(153): n is a, c, g, or t
  misc_feature (183)..(242): n is a, c, g, or t
  misc_feature (257)..(260): n is a, c, g, or t
  misc_feature (262)..(291): n is a, c, g, or t
  misc_feature (293)..(306): n is a, c, g, or t
  misc_feature (315)..(316): n is a, c, g, or t
  misc_feature (342)..(386): n is a, c, g, or t
tatacattacacnnnnnnnnnnnnnnnnnnnnnnnnnnnnnnnnnnnnnnnnnnnnnnnnnnnnnnnnnnnnnnnnnnnntnnnnnnnnnnnnnnnnnnnnnnnnnnnnnnnnnnnnnnnnnnnnnnnnnncttcatgtnannnnnnnnnnnnattacggttcatacactatagtagaaactnnnnnnnnnnnnnnnnnnnnnnnnnnnnnnnnnnnnnnnnnnnnnnnnnnnnnnnnnnnnctaccatgaggtcannnntnnnnnnnnnnnnnnnnnnnnnnnnnnnnnntnnnnnnnnnnnnnncgaccacanntaccactctagtagaatgaatctgannnnnnnnnnnnnnnnnnnnnnnnnnnnnnnnnnnnnnnnnnnnnttccatttcatcctaccattcattatcgctgccctagcaatggkccatcttctattcsyacatgaraccggctctaataacccaacaggcctagattctgacscagataaaattccatttcatccctactatactattaaagacctactargagccttcatgctattaattgctctcatwactttartattgtktttcccagatattttargagaccctgataattatactyctgcrwatccactcaatactcccgcacacattaaaccagartgatacttcctattcgcctacgctatcctacgatctatccctaataaactaggargagtcctarccctaatcctctctatcctaatcctagcaactctatcattactacacacatct

SEQ ID NO: 3529 - DNA, 581 bp, Cricetulus griseus; identical to SEQ ID NO: 584

SEQ ID NO: 3530 - DNA, 529 bp, Cricetulus griseus
  misc_feature (38)..(55): n is a, c, g, or t
acctggaggtggcaattttggaggtagccctggttatnnnnnnnnnnnnnnnnnntatggtggtggaggacctggatatggcaaccagggtgggggctacggaggtggttatgacaactatggaggaggaaattatggaagtggaaatkrcartgattttggaaattataaccagcaaccttctaactatggcccaatgaagagtggaaactttggtggtagcaggaacatgggaggaccatatggtggaggaaactatggtcctggaggaagtggaggaagtgggggctatggtggaaggagccgatattgagcttcttcctatttaccatgggcttcactgtataaataggagaggatgagagcccagaggtaacagaacagcttcaggttatcgaaataacaatgttaaggaaactcttatctcagtcatgcataaatatgcagtgatatggcagaagacaccagagcagatgcagagagccattttgtgaatggattggattatttaataacattaccttactgt

SEQ ID NO: 3531 - DNA, 783 bp, Cricetulus griseus
  misc_feature (111)..(118): n is a, c, g, or t
  misc_feature (120)..(146): n is a, c, g, or t
  misc_feature (202)..(208): n is a, c, g, or t
  misc_feature (210)..(222): n is a, c, g, or t
  misc_feature (225)..(226): n is a, c, g, or t
  misc_feature (259)..(267): n is a, c, g, or t
  misc_feature (280)..(303): n is a, c, g, or t
  misc_feature (429)..(465): n is a, c, g, or t
  misc_feature (494)..(503): n is a, c, g, or t
  misc_feature (507)..(510): n is a, c, g, or t
  misc_feature (516)..(541): n is a, c, g, or t
gtcgacccacgcatcckstssycatmatwwacttcacaattttttcaggcccaatagtcactatgctcagctccagtttctttcttrtatgaatkggkttaraaataaacnnnnnnnntnnnnnnnnnnnnnnnnnnnnnnnnnnnaacccacsatccmkaraasvatsrrcraaatrctttatkwckvmccactcgtccgnnnnnnngnnnnnnnnnnnnnggnncctcaactataaacaaatrggkctatgracatnnnnnnnnncaactaataatgnnnnnnnnnnnnnnnnnnnnnnnngrctgbsaaycaaayyaggcctttctccattycacgcctgactycctgawskttccccggaattccactctagatgggaccacttttactcacctgacaawwagtagcccccttgactaccttacnnnnnnnnnnnnnnnnnnnnnnnnnnnnnnnnnnnnnsccctctgcccttatctcakyactagktnnnnnnnnnnarannnnawaccnnnnnnnnnnnnnnnnnnnnnnnnnngattcatccatctcccatatargctgaataatctctattstcccatacaacccatsacttacaattatsaatstaattatctacatcatatkaacactagctgtattcttaatwctacatacccactstttctcgtstatcaaaactatatcactactaygaaataaagcaccagcattattaccaatcatarccmtarttttattatcaacaggaggactcccaccacttagcaggatcat

SEQ ID NO: 3532 - DNA, 1503 bp, Cricetulus griseus
  misc_feature (32)..(38): n is a, c, g, or t
  misc_feature (46)..(60): n is a, c, g, or t
  misc_feature (62)..(78): n is a, c, g, or t
  misc_feature (112)..(141): n is a, c, g, or t
  misc_feature (208)..(209): n is a, c, g, or t
  misc_feature (297)..(308): n is a, c, g, or t
  misc_feature (655)..(655): n is a, c, g, or t
  misc_feature (1080)..(1107): n is a, c, g, or t
  misc_feature (1451)..(1465): n is a, c, g, or t
tgtagtagtgtcaaacacttacggaacaaacnnnnnnngcgtgggnnnnnnnnnnnnnnngnnnnnnnnnnnnnnnnntctctsatacycctacctctaacctggttatcannnnnnnnnnnnnnnnnnnnnnnnnnnnnnagacacagtywcttaatcaatactttarctatagcaactctatgacgaaggaacgaarcavgykttnnactctcccacacattktatatygatgcactatcttgatcaykaatyatattacttatctaacttctaccactgatactactagctatnnnnnnnnnnnntaaaaaagaaaccgactacaacraaaaactttatrttkctatactaatyattctacaaactctkctaatsccaacattytcagcaaacgagstyatactattttatattktatwhgargccacacttmttccaactcttgtraycrtywcacgatgaggaamccaaacmgagsgatkaagbgcrggcctttactttctstyttacacactaskrggmkmratsccattactaatkgckktaakttscatcaactctysactargrtsattaaatacatyacttckaactytatckmmttmkrkatdvaaccaayyatggdstawccatattttatkactakcatgcnkgatasccywtdtwatmaaartacctktatacsgagkacmtvyatgactbccwaaagcwcatgkrvaarccsmtwtkgscgggkstwtwattctagsggstwttytmytaaaattrrgrggbkacggratrmtacggctwtmggdaattctagathcactaacaaaatctrtggmttatccatttattatactaycactatkaggaatwatcrtdskdgskrkaatmtgcctmmrackgggaggcctawamtcayttatkgmstactmatmastsastcacatggyaytagttattgcagctattataattcaaacaccatgaagttttataggagcctcagcactaataawcgywcawggbyttacatcttmtmtactmtywtgtsttgmtaatactaactatgaacgtatscacagccgaacnnnnnnnnnnnnnnnnnnnnnnnnnnnngctytycccctyawagccctattttgattcttaggaagcctwactaacctarcccttccaccatcaatcaatytaattggagaattactaayctcaawttyactayyctcatgatcwaattttaccatcttattagtaggaactaacatcctaattacagccctatattcactatatatactaatwactwctcaacgaggtaagttaacaccacatataattaatctacaaccatcacacacacgagaacttaccttaataatactccacattacaccactttcacttttaatgattaacccaaaatttatcataggcaatacattataaaaaaaaaaagcttnnnnnnnnnnnnnnncgcccccccgcggggggcctccacttttggttccctta

SEQ ID NO: 3533 - DNA, 966 bp, Cricetulus griseus
aagtcgcgttgaaaacagggagtgcttggtgccccccgcccccatgcccacccaggatgcccctgtcccgcttgctgagatctgcgggggtcttcctgctgccggscccctgctgggcaccccgggagaggtggcttggttccctacaacgaccctccctggcatatgggtgtccagtcctgggggcctggcacagtgcccgctggtsgwsccamgygtkgmsrkwgmarmmymgagtatttygckyykmwmdsagaatgaatgggaaccagaaattggatgcttgtamccaagaaaggcaggatttcatccagcacttctcccakatcgtgaaggtgctgactgaggacgggctaggccacccaragacaggcgatgccattacccggytmaarsaggtcctakagtacaatgctgtgggaggcaagtacaatcggggtttgactgtgttgcaagcataccgggagctggtggagccsadgaaacaggatgctgakagtcttcadcgggccctgacagygggcykgtgtgtagaactgctccaggctttctttcttgtgtcagatgacatcatgrattcctccctcactcgacgtggacagatctgctggtatcaraagccargcatargcttggatgccatcaatgatgctatgcttctggaagcctgcatctaccgcctactgaagttctactgcagggagcagccctactacctgaacctcctggagctctttctgcagagttcctatcagacggagattgggcagactctcgacctcatcacagcaccccakggccatgtggatcttgatagatacactgaaaagaggtacaaatctattgtcaagtacaagacagctttctattctttctacctgcctgttgcagctgccatgtacatggccggtattgatggggagaaggaacatgccaatgccaagaagatcctgctggagatgggag

SEQ ID NO: 3534 - DNA, 277 bp, Cricetulus griseus
aatgtcacttagaaaggctaacttggtttattgttcagtgggggtagaaaaagcttcctaaaactgaaatatttcaaggaaactgatcttcaaattctgacattggttattctaagcaactgaaccaattgctcacttggtcataaaataagcaaaaactagattcttcagtgtagcagagactccccagactcattcagttctacttttacaaataagattttacatgtattaggaagattttgtgcaacagaaaagttgtacagaaagtacattc

SEQ ID NO: 3535 - DNA, 447 bp, Cricetulus griseus
agactcatactgtgtgtctcagtttgcttgtcaccatgtttctgtacaacttgaccttacaacgggccactggcatcagctttgccatccatggcaacttctctgttcctggagggtcagatggtccaagtggagtgctgatctgtgctgaaaattatattacctataagaactttggtgaccagccagatatccgatgtccaattcccaggagacggaatgacctggatgaccctgaaagaggaatgatttttgtttgctctgccacccataagaccaagtccatgttcttctttttggctcaaacggagcagggagatatctttaagatcactttagagacagatgaagatatggtaactgaaatccgcctgaagtactttgatactgtacctgttgctgctgcaatgagtgtgcttaaaacaggcttcctttttgtggcatcag

SEQ ID NO: 3536 - DNA, 540 bp, Cricetulus griseus
atgcaataattaaagaagagcttgatgaagactttgagcagctttgtgaagagatccaggagtctaggaagaaacgaggttgtagttcctccaaatatgcaccatcttattaccatgtcatgccaaagcagaattctcctcctgctggtgataaaaggtcagctcaagagcccagtgaaaagctgaaggcaccgtgtcctcctgtggcttgcagtacccctgctcagttgaagaggaaagttcataataagtcaaagtggcatgtaggtaacaaaataaagcgaaggaaactttcacaagcaaaagacaatggccaaactgctgtgaataatcaagtcaggagtagtgatacggaggaaagtcagcccacaagcacagagcacaatgagctgggaaacacgggagagtcttccgtagaagagaatgagaagcagaatgtctccgaaaacaacctagacctgaaaaatacctcgagtacctccaatattgagaatgagcttgaagaatctaatgaaattacagagtgtgcagacttgagaa

SEQ ID NO: 3537 - DNA, 600 bp, Cricetulus griseus
  misc_feature (14)..(14): n is a, c, g, or t
gtcgacccacgcgntccgaatagatttccaaggcagaaggggttgaaggcaagcccatgactgctatcacgggccatgggcatggcagatgggcccagccattgctgtgcagagtgtagcaatagagagcccctcactgtcgcatggccctccccagagcatgcccaacccaggagtctgtctcattgtttatctaaccaccaagagagcccctcccttaaaacagtatgccctcacaaacctaccatgtgaatgaactgggaaaggggcatgacccccaggtgtgtatagctgtgagtttcaataatctagcactatgttggacccactccccttccacccagccagctttgctgtcagatacaagtcctgttccctgtttgtcctcttccagggactgtagcctggaggcttccacacagcccacacatctcttaggctccattataatcactttcctagagacgctggcctgtctgtgaaggctgagcttgtgtgtggtgttgggtttatgcctcctgctccctcccaccctgtatctgggcatagttcacatcaagtgtgtatccgccaggctccaggacctttctggatttgcca

SEQ ID NO: 3538 - DNA, 123 bp, Cricetulus griseus
  misc_feature (3)..(3): n is a, c, g, or t
  misc_feature (6)..(6): n is a, c, g, or t
  misc_feature (23)..(23): n is a, c, g, or t
  misc_feature (34)..(34): n is a, c, g, or t
  misc_feature (50)..(50): n is a, c, g, or t
gtncgnaccccacgccgctccgnattagcctttnacatttttttcacttnctcggggactgttgctattttccgattcttcaccctaatgtctaccgctttctattgtgttaagaaagggaat

SEQ ID NO: 3539 - DNA, 528 bp, Cricetulus griseus
  misc_feature (8)..(8): n is a, c, g, or t
  misc_feature (68)..(68): n is a, c, g, or t
  misc_feature (73)..(73): n is a, c, g, or t
  misc_feature (80)..(80): n is a, c, g, or t
  misc_feature (147)..(147): n is a, c, g, or t
  misc_feature (154)..(154): n is a, c, g, or t
  misc_feature (185)..(185): n is a, c, g, or t
  misc_feature (191)..(191): n is a, c, g, or t
  misc_feature (250)..(250): n is a, c, g, or t
  misc_feature (353)..(371): n is a, c, g, or t
  misc_feature (447)..(447): n is a, c, g, or t
  misc_feature (487)..(487): n is a, c, g, or t
gcccctantacgcctgcgcgcaccggcaggcgtctcgaggcgggtggtggacgatggcggcggcccangccgnggagganatgcggacgcgcgtggttctgggagagttcggggttcgcaacgtccacaccaccgacttccccggtnactactngggttacgacgacgcctgggaccaggaccgnttcganaagaatttccgtgtggatgttgttcatatggatgaaaatacactggagttcgacatggngggaattgatgctgccattgctaatgctttccggagaattctgttagctgaggtgccaacaatggcagtggaaaaggttctggtttataataacacatccatnnnnnnnnnnnnnnnnnnngctcaccgcctggggctcatccccattcttgctgatccacgtctgtttgaatataggaacccaggggaggaagaangaacggagatagacacactgcagtttcggctacaggtcangtgtaccaagaaccccaatgctgctaaggattcctctgatc

SEQ ID NO: 3540 - DNA, 445 bp, Cricetulus griseus
  misc_feature (276)..(276): n is a, c, g, or t
  misc_feature (341)..(341): n is a, c, g, or t
  misc_feature (422)..(422): n is a, c, g, or t
  misc_feature (431)..(431): n is a, c, g, or t
  misc_feature (436)..(436): n is a, c, g, or t
attctctctcagcccacaccctcgcttgttgtggaccataggcgcttaaaaaatcttttggagactgttgttaaaaaaagtcaggaatataatatattccaactggaaaacttgtatgcagttatcagccagtgcatttatgagcatcgcagggactatgacaaaacagctcttgttcagaaaatggagcaagcagtagaaaacttcaattgttccagatcatgatgtcattgcaccaagtatttttatattcaattcctatttgattgtcttcanatatgtccacataactgatgcaagataaaatgaaatcttgcattttgaagaaaaattaaaatagngaaagtattttaattccctggtacttatgtacatgtggtaagataactgataagtcttggatgtttgagcagaacactgtnacaatagtnattgntcaagtttg

SEQ ID NO: 3541 - DNA, 323 bp, Cricetulus griseus
  misc_feature (224)..(239): n is a, c, g, or t
ggcgtgagcttcggccgccattttacaacagctccactcgcgccggacacagggagcagcgagcacgcgttccccgccacccgacccggtcggacaggattcctcggccgcagccccgcggggagatctctggaaacatggctacagaacatgttaatggaaatggtactgaagagcccatggatactacttctgcagttatccattcagaaaattttcagacnnnnnnnnnnnnnnnnttaccacagaaagttgctggaaaactagatgaaatttacgttgcagggctagttcacatagtggttttagatgaaagaagcctt

SEQ ID NO: 3542 - DNA, 567 bp, Cricetulus griseus
aacctacagaaggatatgcctatgaaagtacaagaagcttacaggacaccaaacagactggaccacaaaaagaagtccccccgacacataataatcaaaacaccaaatctacagaataaagataaaatattaagagcagcaaaggaaaaaggctaagtaacatataaaggcaaaccaattagaatcacacccaacttctcaatggaaactctgaaagccagaaggtcttggatagataccctacaagcactaagggagcatggatgtcaacccagattattgtacccagcaaaactttcaatcattatagatggagaaaacaagatattccatgacaaaaacagatttaaacaatacatatccacaaatacagcactacagaaggttctgaaaggaaaactccaacccaacgaacataactagaaaacaaacaagaaccaatgaacaatggatattaatatccctaaatgtcaatggtcttaacttacccataaaaagatataggctaacagaatggatacgaagacagaatccatccttctgctctttacaagaaacacacctcaa

SEQ ID NO: 3543 - DNA, 579 bp, Cricetulus griseus
  misc_feature (474)..(498): n is a, c, g, or t
ttcaggacttaaggaaatagcagtacacgtttaataatagcactgtatagcaaagtgttttattttgttgtttggataactcatatactggtaaaatatgttttgtgacataagaatagacaaatcatgttttctcttaattgacaatttgctagagtttcaagattacccatatccccataaatgacatgagatattgagaactaaatactagaagccgttttttgtagcagtgtttgaactgaatgttttggagtcacagttccttctttgtttttacctcctgtggtgattaagggccctgttgaaatttagggattagcccttatgagccaggtatggtaacatacaactataatcacagcactgaaagaggctgaaggttttgattttaaacccagcctagactgcagaacaaattccatgccagccttgctacataagaccttgtgtccccatctcccccaatttatnnnnnnnnnnnnnnnnnnnnnnnnnccgcccccgcgggggacccccactttttgtcctttaatggagggttaatagcgccctggccgaaacaagggacaaacctgt

SEQ ID NO: 3544 - DNA, 498 bp, Cricetulus griseus
  misc_feature (135)..(156): n is a, c, g, or t
  misc_feature (161)..(214): n is a, c, g, or t
  misc_feature (246)..(297): n is a, c, g, or t
  misc_feature (321)..(371): n is a, c, g, or t
  misc_feature (382)..(396): n is a, c, g, or t
  misc_feature (398)..(412): n is a, c, g, or t
  misc_feature (414)..(447): n is a, c, g, or t
gtcgacccacgcgttccgggatacacaaattttggacagggattattcctaactataccttacacattagatactactacagcattctcatcaggcacccacatttggcgagatggtaattacgggtggctaatnnnnnnnnnnnnnnnnnnnnnnagctnnnnnnnnnnnnnnnnnnnnnnnnnnnnnnnnnnnnnnnnnnnnnnnnnnnnnntcatacactatagtatgaaacttcgaaacgcnnnnnnnnnnnnnnnnnnnnnnnnnnnnnnnnnnnnnnnnnnnnnnnnnnnnctaccatgagggcaaatatcattnnnnnnnnnnnnnnnnnnnnnnnnnnnnnnnnnnnnnnnnnnnnnnnnnnntaccactctannnnnnnnnnnnnnntnnnnnnnnnnnnnnntnnnnnnnnnnnnnnnnnnnnnnnnnnnnnnnnnntttcatcctaccattcattatcgctgccctagcaatggtccatcttctatt

SEQ ID NO: 3545 - DNA, 579 bp, Cricetulus griseus
ggctggatatgccaagtgactcgcctattgcctgaaggcttttagagtctttagatggccttctgactgtctagggttctttccaacccgtgcagcactcacaggccaagactccggcttattcccgtcacaaccagatatgtagtgaggagagtcctggactcagtggtgaggagaagccacgaagacaggaatttgccgcttcatctgtcggcatgctgttcctagaagtctgccctgagaggggggtgtctttgctgggagagtttgatgctgagcaccatgctgtgatgggggaaggtttgaagaatgtgtcgaaactttctggattcttctcaaagatgaattcctaagccaagctacaagttcatccaggctcagaattccaggattgtgggcaggagccatcatcttcactatatttttagatttttttaaaaggtggaattgaggatccagatctagagggagacaaggaaggtaaggagaaagttgtagcagttgagctagaaagtcttgttagaatttttgatggggctgactggacagggggaaatgtggtcctatcccttttatcta

SEQ ID NO: 3546 - DNA, 579 bp, Cricetulus griseus
  misc_feature (396)..(512): n is a, c, g, or t
  misc_feature (572)..(572): n is a, c, g, or t
gtagctgccaagaccaagggccctgcaggggaccgagtccggccactaagtgcccgcagtgagcctgcagacaagccaggccgtgtgcccctcaccaggaagccctcagtccccaagactgtctcaaaagtgtctcctgccacgaggacctcctctgggctcagtggccgcccagtgccacctggggctggctcccctgtctacctggacctggcttacctgcctgggggtggcgcgggccacctggacccggactttttccttcgagtacgtgcactctgctatgtcatcagtgggcagggccagcgccaggaagagggcctgcgggccgtgttggatgcactgctggctggcaagcagcagtgggaccttgacctgcaggtcacactgatcccnnnnnnnnnnnnnnnnnnnnnnnnnnnnnnnnnnnnnnnnnnnnnnnnnnnnnnnnnnnnnnnnnnnnnnnnnnnnnnnnnnnnnnnnnnnnnnnnnnnnnnnnnnnnnnnnnnnnnccctgcctgcatagtggagttctagccacgggccacagcacaccctgaggacagcagctnctcactg

SEQ ID NO: 3547 - DNA, 355 bp, Cricetulus griseus
gtacctattggaatacaagtatggaaatcaactgttgaacacgtttgctgtagctctttctttcctcaagaaccaaaattgtttgtcagctggtagaacaggttgaagtctgcctgtatcagctaatgcttccatttatgttaggtgatgcagggactgacacgttggagaaaggaaaattgtggttaagaatttccagtaagaacctaataactgagattattaagggagttttctatttcagatgatacaattataacagaagtcaactcatagtcattatagcaagatgaacaaaccctatggtttttttgttgtcgctgcttgatctttttttttccttttttttttcctt

SEQ ID NO: 3548 - DNA, 216 bp, Cricetulus griseus
gtaccactaagtccagcagaactttttggaaatatgttagctagtttgatattatataaaaataagggaaatatcacctgaaaataaaggattcataatagaatggtattttgtggggcacttgtaatgtttacaatattaataaaccaatatacattttaccattgtaactgaaataacataatcattcctatgacatagaaggttcacttaatt

SEQ ID NO: 3549 - DNA, 567 bp, Cricetulus griseus
tcaatctcctaaaacacttctttttggggcattatctgagatccctggctcctccaaaagggctcggctcgaattagaaagtcctcaagaagcattttggattctgagatatctaccgcttaccagactcccaagaagagtaaccaaaaatctccaaactttccaaagactacaccaagaaggaggttccctcgtatggtacagacctcactgtgcactccagaaagactacaaaactcccctacaaaaataactccagctgaggggggcatttctgaggcattctcctcacatagttacagttcaccattggcatcaaaggtcactccccaaaagagagtctccccaacagaacagacctctcctcttctcacagagctgcccagcacacccagggggccagacgtccaactacctcgatgcttgtcggactgtgcatggctaaactcagtgaattccagtccagaaagcccttattgtcccccatccccaccttgcctgactgccgaatctcagagtcagtgtctaagccctgcaagatacttcagaacatctccacgtacagcc

SEQ ID NO: 3550 - DNA, 550 bp, Cricetulus griseus
gctgatgttccagaaagctgattctgatttggattacattcaatataggctggaatatgaaatcaagaccaatcacccagattcagcaggagagaaaaatgcagttgcaattttaaaggaattatcagcaataaagtctcggtatcaagctttgtgtgcacgctttaagccactttctattgaacaaaaagagaacaagagccgcatttgtgctactctgagcaagacaatgaccacgatacaagaactacaaaaacagacagatctggagctaactcaactgactgaagaagagaaagcggtgacagagcagttaaaatctcacatgccggacctataaagacatggaattttaaaaaggaactctaatggaggaaagatcaattccaaagagattcagcatgatgtcgtattgatgtcattaatccatcaaggagttggaagctgataagaagattgagattttccttgatcatgatgcttttaatatgagaggaaattgtaagaagggtgtatatcatataactaaaagccaagaaggatgaaatga

SEQ ID NO: 3551 - DNA, 472 bp, Cricetulus griseus
gaccttgttccagcagctcgcccctctgtatgaaattgtaatcttcacatcagagactggcatgactgcatttccactcattgatagcgtggatccccatggcttcatctcttaccgtctgttccgggacgccaccagatacatggagggacaccatgtgaaggacatttcatgtctgaatcgggacccatcccgagtagtggtcgtggactgcaagaaggaagctttccggctacagccctacaacggtgtcgccctgcggccctgggacggcaactccgatgaccgggtcttgctggacctgtctgccttcctcaagaccattgcagtgaaccaagtggaggacgtccggactgtgctggagcactatgccctagaggatgacccattggaagcattcaaacaacggcagagtcggcttgagcaggaggagcagcagcgcctggccgagctctccaagtgcaacaagcag

SEQ ID NO: 3552 - DNA, 600 bp, Cricetulus griseus
ggaagataaatatttttgtgaaaattgccatcattatacagaagcagagcgaagtctcttatttgataaaatgccagaagttatcactattcatctgaagtgctttgctgctagtggcttggagtttgattgttatggtggtggactttccaagatcaacactcctttattgacgcctcttaaactgtcactagaagaatggagcacaaagccaactaatgacagctatggattatttgctgttgtgatgcacagtggcattaccattagtagtgggcactatactgcttctgttaaagtcactgaccttaacagtctagaactagataaagggaattttgtgtttgaccagttgtgtgaaataggtaagccagagccactgaatgaggaggaagcaagggggatggctgaaaattacgatgatgaagtgtcaattagagttggtggaaatgcccagccaagtaaagttttgaacaaaaaaaatgtagaagctgttggacttcttggaggacaaaagagcaaagcagattatgagctgttcaacaaagcgtccaatcctgataaggttgccgggacagcatttgttgaaaatagaaattc

SEQ ID NO: 3553 - DNA, 479 bp, Cricetulus griseus
tatgaaggcaaagcagagagcagaggttcttcagtccacgcaacggttcttctctgaacaacaacagagcaaacagataggaggcaaaggccagaaagtggacagtgattcaagtaaatctccagaaaccctgactgaccctcctggtgcctgtcaggaaaaagtagaagaaaagccacctcctgcacccaccataaccaccaaacctgttagaactggaccaatcaaacctcaggccatcaaaactgaagaaacaaaatcttaaaagcttttgtttattgcagggcattgggggtggggcgggcagggaacatgaagtcaaaacaatgccagcagccaggcggtaaaatggtctatgacattatcctgtgtagcacttgaagatgcacaaggggcatagagcattttatactgatagagctgctacaccagttaaaatgaggctttacaggcttgcacctactatgtaacatttgcta

SEQ ID NO: 3554 - DNA, 440 bp, Cricetulus griseus
tcaagaaattgtgcacagtgccttgcccataataggtactcaataaacagttattcctcatagtctgttgccatggtttctagtgttttatgaaatttgtcttaattgaaaaagaccaaatatttcaaataaagcttataggcagctgtgtccagtcactgtagggttgtacagttagttcctaggatgttattttgcactagttgtcacttagaaacatggggttctgtagattcttggtgctaagggatactttgtcattttgatgaagtaagtgttaagtgtcagataaatagcacagaatagttctttctgcaggtctgggtttttgttttgtttttctttgttgtttttaattgtaaaatgttaccaatcaaactattgtagcagctacaaaataattcaccagcatgacaaaatagtcaaaaaaaaaaaaaatg

SEQ ID NO: 3555 - DNA, 377 bp, Cricetulus griseus
tcttataagattgacttgtgcatctttttaaaaaagcttttcggatatttattacatgaatattgattgttttgctgattttgtatttggggtttttgtttaattgcacgtgatggcaatgattatgtgcccctggtactgttctaagaacttaatatattgtgtctctaacccttgtgtctttcaaggtagttgaaacctttctcattttatggttgagaagctgaatcattgacttaccaaggccagaactgctggtccatgcagggcgaggattctgacccatgtcttcttttgctataccacaacttcaaagggcagtcatttttcttgtggtacatagtagtaaaaaggagtaggcagaacatgataaaaaa

SEQ ID NO: 3556 - DNA, 328 bp, Cricetulus griseus
  misc_feature (37)..(51): n is a, c, g, or t
  misc_feature (198)..(198): n is a, c, g, or t
  misc_feature (249)..(249): n is a, c, g, or t
gacaccactgtgactcttgctccctttgaggacaccnnnnnnnnnnnnnnntttggctggcagcagcagttttcactgagtgaaaagaaactggaatcgaaactgtcttccaatggcactgcctcgtcagggtccaaggtcaccacagaggattcgggctcttcggagaggcatgccaagaaagaagactgacaattntatctgtgcttgggaggcaaaaagggagagttacttatttatagggtgtgngtggtatttctatgtaaatgatgtgaaaataagcctatctgtaagggatagaggagacaaaaaggaagaaacgccttat

SEQ ID NO: 3557 - DNA, 580 bp, Cricetulus griseus
  misc_feature (342)..(364): n is a, c, g, or t
cgcacactaacctccgcgtgcgagtcggtcgcgctccgagcccacccggccctgtactactactcggctttcctgtcaagatgcctgaggaggtgcaccatggcgaggaagaggtggagacctttgccttccaggcagaaatcgcccagctcatgtccttgatcataaatactttctactcaaacaaggagattttccttcgagaattgatctccaatgcttctgatgccttggacaagattcgctatgagagcctgacagacccttccaaattggacagcggcaaagagctgaagattgacatcatccccaaccctcaggagcgcacgctgactttggtgnnnnnnnnnnnnnnnnnnnnnnnagctgatctcataaataacttgggaaccattgctaagtctggcacaaaggctttcatggaggctctccaggctggtgcagacatatccatgattgggcagtttggtgttggattctactctgcctatctcgtggcagagaaagtggttgtgatcacaaagcacattgatgacgagcagtatgcttgggagtcctctgctggtggatccttcacagt

SEQ ID NO: 3558 - DNA, 128 bp, Cricetulus griseus
taacccgtaagtgctttctatcctgggaacctgtgttaggtgatcacaatgtaagctgcatgggataaggttgttttcctgttacaatgttgaaatccccttagctatgtttccaaaaaaaaaaaaaa

SEQ ID NO: 3559 - DNA, 512 bp, Cricetulus griseus
  misc_feature (332)..(392): n is a, c, g, or t
actttctctctcgtctagtttatcaagagttcagcaggagagggaaccctgcagctaagaaagactatttgtgggtagtgtttgccacaagtgttagtcttctctgttaaccttagggagacaacgtgaagcagagcttctagtgtttgctgttttcatggcagctaagtaagagccttgaggtgactccttgtgctcttcaatcaagccacacttaggggccctctctacagtattagaatcttatttgcctgattatgccctgtctgcatctatatatgtgtgacagtcactttttgcatggcttctgtgcctggcttgtggcatttggnnnnnnnnnnnnnnnnnnnnnnnnnnnnnnnnnnnnnnnnnnnnnnnnnnnnnnnnnnnnngcattgttaccctttttcttgctttctcctgagagaaggctaggaccagactgagaagacctgcagctgaccttttcttcccagtatggccacttcaaagtggaacaaatggtagtcaag

SEQ ID NO: 3560 - DNA, 579 bp, Cricetulus griseus
  misc_feature (522)..(522): n is a, c, g, or t
atgtgtgtcttttttccgatctttgttttgataataaatattctgctatcagtttgggacaattgtagagcctatggtcgtgtgaattattgtcttatacagcttgatgttactctgtccctgttcttagctatagcacccatttcctggtgcctgaggtccctgccatcagaaagtgatttgggtgagaattctgtcacttgtgcgcattaaagtgacacctaataaaacaaggatgtcctgcttttgttcagacactcgatatgaatgaagctttgcatcctagttggtcattgagccaacatcctcggtacctgatagtgacacaaaatagatgttggtgcctaaacggaattctcagtgcctgttgagacaggcgaatgtccgtaggtaaatccacggctgaaaggaccagttaaagtacacccactcatagtatcacaggatacccagaagcctctagtataacccagtactcttttcatcctcagatactctgaagagttagagttcgatacccanacttcatatttcctacgctctgaaatttgttttgatggatgcaacagggccaccttg

SEQ ID NO: 3561 - DNA, 566 bp, Cricetulus griseus
agaacgtgtttgctgggcagtcaaagatctatgcctacatgagtcccaacaaatgctctggaatgcgctcccctcttcaggaagagaactcagttgcacatcacgaggtcaaatgccaggggaaaccattagctggaatctacaagaagcgagaagagaaaagaaatggtgggagtacgatccgaagctctgtgaagtccgatgaacagaagatcaaagacgccaggagaggtcccctggcaccttttccaaaccaaaaatctgaagcagcagaacctccaaaaactccaccccagtcatgtgatcctacgaatacagtggttgccaagcaggccttgaaaaagcccctcaagggcaagcaggcccctcggaaaaagtctcaagggaaaacacagcagaatagaaaattggcagatttctacccggtgcgaaggagctctaggaagagcaaagctgagctgcagtctgaagaaaggaaaaaaattgatgagctgattgagagcgggaaggaagaacgcatgaacattgatctcattgatggaaaaggcagaggtgtgattgccacc

SEQ ID NO: 3562 - DNA, 553 bp, Cricetulus griseus
gtgggtgaaagacccgagctaacatggggttagttcgttaaattacaataaagcctcgtgcagtttgcagcaagctctcgaatccgcctggtgattggggtgaccgcgaacctggcctaagaccccggatacttgagttttcgggggtctaacattttgggggctcgtccgcgatttgtgaccacccttcacctgagtggattcgatcttggaggtgtctggagacatggctcagcagttaagagcacaggctgttcttctacaagatctctgagtgaatcccagattactgtgtgtgcttgtgtctgctgtggtgcacgtggaaagatcacagaacaacttacagaagccagttctctccttccatcaagtgataaataagtcaagagtactttcaaaagacattgctgtagaccaacatgtgaaactaagagaagcaaaaaggactctttcttttttgattttaggaaattgaatgatatatttgccattggttgtattttgctaattatgttatgaaatactggtaagggaatatagcctatattatact

SEQ ID NO: 3563 - DNA, 312 bp, Cricetulus griseus
ctgtgaggaaaatatgtgcccttgatgaccacgtctgcatggcttttgcaggtttgacagctgatgctagggtagtaataaacagagcccgggtggagtgccagagccataagcttacagtggaggaccccgtcactgtggagtacataactcgcttcatagcaactctaaagcagaagtatacacagagcaatggacgaagaccttttggtatatcggccttaattgtaagctttgatgatgatggtatcccaagactgtatcagacagatccctctggtacttaccatgcttggaaggcaaatgcaatag

SEQ ID NO: 3564 - DNA, 475 bp, Cricetulus griseus
ccctaaacgctacggcggttactgcgagtgttggcctgcgctgttcgagcacttcccggagcagctgtccagacagctttgagacagctcggcagttctgacctagtaccacccggcgcggagcaacctttgaaaacgcgcgcgcctaaacgctgcgacggttacagcgagtgtcagcgggagctgttcctgcatcttccggcctgggtgctcacacagctttgagccagctcgtcacttcacctttttacttgatcaagggtgtgactgtggacctaaagtgattgctacaatggaaggaatcaataatttcaagacaccaaacaaattatctgaaaaaaggaaatctgtattatgttcgactccatgtgtaactatccctgcctctccatttatgcagaagcttggctttgggactggggtcaatgtttacctaatgaaaagatccccacgtgggttgtctcattctccttga

SEQ ID NO: 3565 - DNA, 409 bp, Cricetulus griseus
atttggagtattctatgtaaaatataaatagatctgaagcagttaatccatcttataaagccatgatatataccacaatatggttatattaatatgattatttccctttgtctaccattatttgaactttatgataagcttatattaaactggttgttatattgatttgttaacttctcatatcaggcatttgccattgatatcacatcttgaagaaacttaaataattgttcaatacttataattatcaatgcattcagtgacctgtttaacatacttgaatgtcaccagcaatgctcaccttctaacagatcatatagagatagcatagttgctttatttcacaaatcactaagatagccattatatttccctccaaataattggctcttaaccatgggccagatat

SEQ ID NO: 3566 - DNA, 489 bp, Cricetulus griseus
aaaagctaaggttgaaacctgcaacagggtctgaggtacggggaaagctagaaacaaaatcggacctgaacttgcaacagcaggaagaggagaaagctcggctccttatcggtttaagtgtgggtgacaggaaccctggcaagaagtccctcttcagcaggcgcaagtgatctggagatccacgtgactgcagtctaggatctgactctggctcaggatctggggacttgggtgtgggcagagcttcccttcatgccacgggatttgggggctttggagctcatagggaactgagacccgttcaaccgctggcctgtccctgcagggcatggtggacaaaagtgctaaatttcctcatgcttattaggcccagggccagaaaggcaagagaatcagaaggcctgtggagtgtgtccaagcctagtatcctgcaacagaaagggtggggggatagttctgatcaagtatgataaatttttataaatagac

SEQ ID NO: 3567 - DNA, 350 bp, Cricetulus griseus
  misc_feature (69)..(105): n is a, c, g, or t
gaaataaaaataaagctaaactgtcattttcctgtttctcagcgcagtgaggaaggtaatggttatgannnnnnnnnnnnnnnnnnnnnnnnnnnnnnnnnnnnnaggcctcttctttttgtgtccttgtttctcctaggtaatgagaaaaggtctttttattgtcgctgtgttgctctctgagcatcttcttgtgtattcatgcagttgggagtgtttccacaaaattcacggcagccacaaaggaaaagtcctaaatcagactgtagtttagacacatgaccggggtgaagcaaacccacatggagtctttgatattcatgagtattggcctgaaggagagggagaca

SEQ ID NO: 3568 - DNA, 264 bp, Cricetulus griseus
ctcggcggggggatggtggtagagcacaacccgggccgcagccccagggctggactggagcgcacaggagggggcatcggagggcagattacggccgcaggactccgtctccgctcgctggaacccatgctcgtttcctgagagactgcacgctgggtgcctgtcgacgtcgagcgccctcctttcgattcctttcgactttgcgatcatctcaaggatgtcttccagaagtcccaaggatttaattaaatgcaagcggggatc

SEQ ID NO: 3569 - DNA, 480 bp, Cricetulus griseus
ttgtgggttgggctttggacattctgtctccaaacctgatctctaccagcatgcttgggcgcgtcaagtacaacctcaactccctgtcccatgatacagctgcggggctgatacagtatgcgttggatcagggtgtgaatgtcacccaggtatttgtagacactgtaggaatgccagagacataccaggctcgattgcaacagcgctttccagggatggaggtgacagtcaaggccaaagcagactccctgttccctgtggtcagtgctgcaagcatctttgccaaggtggctcgagaccaagctgtgaagaactggcagtttgtagagagtttacaggatctggattctgattatggctctggctatcccaatgatcccaagacaaaagcctggttgaggaaacacgtggaccccgtgtttggcttcccccagtttgtccggttcagctggagcacagcccaagccatcctggaaaagg

SEQ ID NO: 3570 - DNA, 286 bp, Cricetulus griseus
ggcaccggcgcgggccatggcttcatcctctctgttatccgcgttggctgtgcggttgctgcgccccgcgcccggctgccacccgcgcctgcagcccttccacctggcggcagtgcgaaatgaagctgtcgtcatttctggaaggggggggggtcatcagatcaagcaagaagtgcggcaggaggtggaagattgggtggcctcatgcaacaagcggccacacctgagtgtcattctggttggtgacaatcctgccagtcactcctatgtgctcaacaaaaccagg

SEQ ID NO: 3571 - DNA, 420 bp, Cricetulus griseus
ttcccagctgtctttactgagtcagccagccatgacacctgtacagtcttgattctatcattggccatctgtgtgagccttcactacaaggctccagtttcttcatctgtcaggtgtgaatagctatgcccacccttttgtcttttgaggggatggtaagttctggagtaccaaaagatcaggccgttctttttaaagaaatgttttcctgccagacaccagagtctgagtcaggcacccaagctgcctctcctcccagttagtatgttcacctacaaagaaagtgatttaaagtaggtgaagatgaaaggatatggctgaccccaaatgtgtgctggcatatatgtatgtactcatgtatggatcttagcagcagagttcactttctctacagtggcaaagtaacactaatatgggccg

SEQ ID NO: 3572 - DNA, 540 bp, Cricetulus griseus
  misc_feature (307)..(307): n is a, c, g, or t
  misc_feature (381)..(402): n is a, c, g, or t
  misc_feature (477)..(477): n is a, c, g, or t
ctcgctgtggggatgtctcacaatgtagatgggcgcaaattcagatacccacagctggacagcacacagagaatgagcgactttggagcactcgttcctaaatggaatgtattcatcaaacctctcccctcagggttcatggagctatgcggaagaagagcagaaagattgtaagtgccagagggaatggatgacatcacggaaactgtgtcttccagacacaagaggactgacgcacatatgaactcatggagactgtggcagtgtgcacagggcctgcacagcctcaagacagatgggatcccanaatgagagggggaggtggatgcaatctcccatccctaatcaagaagctgtctccaattgacaactactcgcaannnnnnnnnnnnnnnnnnnnnnatagtttcactgggtatttaagccacacttaagggcagaccccatgcccagaagtggatggccaacatagaacanactcaacaatatttttatagatttttttggttcatattgctttgagcacctttttatactaca

SEQ ID NO: 3573 - DNA, 2372 bp, Cricetulus griseus
  misc_feature (1)..(39): n is a, c, g, or t
  misc_feature (684)..(725): n is a, c, g, or t
  misc_feature (1698)..(1714): n is a, c, g, or t
  misc_feature (2328)..(2365): n is a, c, g, or t
nnnnnnnnnnnnnnnnnnnnnnnnnnnnnnnnnnnnnnnccggtctgcggagggccctagactggctctccttccctgacctagggtgatcaggttttaaaacctgccttcttggaatcgctggtagagcgtcacctggacgcgtgggaacgggaagtaagcgcagccctggagccacgaacgcggcctggagcccctgaaagcaaaagctagcagcggcctgtggcaggcttcgtccctgaagccgctcgcccggggccccggagctgtgatccgcaagctcgggaactgtggcccgcgagacccggacctgtgatcggcggcgagcagggactctacgaacaggtcaccactctcctgcctcttgaaaggaatggatttcagaaactgtctttacaagattgctgaaaacctggatagcagtgaactggctgccctcaagtttctgtgcttggactacatcccacagaagaagcaggagcccatcaaggatgccctgatgctatttcaggtactgcaggaaaagggactgttggaggaagacaatctgtccttcctgaaggagctgattttcctcatcaatcggctggacctgctgagcaacaccctaaacagcagcaaggaggagatggtgagggagctgcaggttccagacaaagcccaggtttctgcctacagggtcannnnnnnnnnnnnnnnnnnnnnnnnnnnnnnnnnnnnnnnnnaatcttttaagttttttttgaatgaagagattcctaaatgtaagctgtatgatgataactcgagcctgcttgatatttttgtggaaatggagaagagagtcatcctgagggaagaaaacttggatgccctgaaatcaatctgtgcccaggtcaacaagagcctgctggagaagattgaggcttatgaaaaatcaagcagagggagaatgagccttgaaggaggggcagagtcgccagtttcagttttagatggggagagttacttcagaatgcaggaaacgtgggactcccaaagagaacaagacagcgactcacaggtatcacacagaatttaccaaatgaagagcaaacctcggggatactgtctgatcatcaacaataatgatttcagtgaggcgaggaagaacatacccagattccacaaaatgaaggacagaaaaggaacaaactacgatgaagaggcattgactgagacctttaaagagcttcattttgaggtcaagccttacagagactgcacagccaataaaatccatgaggttctaagattctaccaaagcatggaccacaaggacaaggactgcttcatctgctgcatcctctcccatggagacacgggcatcatctacggcactgatgggaaggaagcccccatttatgaactgacatcttatttcactggttcagagtgcccttccctggctggaaaacccaaaatcttttttattcaggcttgccaaggggataactaccagaaagctgtacttgttgagactgactgggaagagatggtcagcttcttagacgtggactcatctcaaaagagctatattccagatgaggctgactttctgttggggatggctactgtgaaaaactgtgtttcctaccgagatcccacgcagggaacctggtacatccagtcactttgccagagcctgaggaaaagatgtcctcaaggcgacgatattcnnnnnnnnnnnnnnnnngtgaactatgatgtgagcaataaggatgacagaaagaacatggggaagcagatgcctcagcccatcttcacactacggaagaagctgtttttccctcctaagtgatgtgtgctctacatggttgacattatgtcagtctatgcacttttgtttggggggaggggtgggttttaatttattttttatgatttcttttattttgagatattatatcatttacctcttccctttcctccctgaaaagttggaatttgaagtccaaagcagaagcttgataaatggaacatcagttctaagtaaggtggcactctgaagccaggaaggttgtacgctaaccttactggcttctatttactagctccatgtctgtctgacagaacgtttaatttctgtaaacattaggctccacatcagtaaagtaggagcaatgaatttctagatcagcaaagcccttagcacaggcatggtatgtgctaaatgctcagcagcactctggccattttactgtttcttcctagttgaaatggatgtgttcccattctgacgccctgtaaacagggattgtgttcattatttctgtggttactggtgggtattaaaggtgggtgaatgcnnnnnnnnnnnnnnnnnnnnnnnnnnnnnnnnnnnnnncggggag

SEQ ID NO: 3574 - DNA, 1462 bp, Cricetulus griseus
  misc_feature (5)..(42): n is a, c, g, or t
  misc_feature (1411)..(1462): n is a, c, g, or t
gtacnnnnnnnnnnnnnnnnnnnnnnnnnnnnnnnnnnnnnntcggccggccatggacgaagcggaccggcagctcctgcggcgatgtcgggtgcgcctggtgagcgagctgcaggtcgccgagctctgggacgctctgctgagtcgagagctcttctcgggggacatgatcgaggacatccagagggcaggctctgggtctcggcgggatcaagccaggcagctggtcacagatcttgagacccgagggaagcaggcccttcctctcttcatctcctgcttagaggacacaggccaagacaccctggcttcattcttgcgaagtagtcggcaagcagccaagcaggatccagaggctgctaaacccctggaccacctggtgcctgtggtcctgggaccaatgggaatcgtatcaaaggagcagaaagtagtgaagttggagccatcgaagcctgccctgggaaacctcaccccagtggtgctggggccggaaggggtctggcctgctacgctcagaccagaggttctcagaccagaaacacccaggccagtggacatcagttctggtggtacctatgatgtctgtgctgcagagaagatcaggagtagtgcagatatggcatacatcctggatgcagacccctgtggctactgcctcatcatcaacaatgtgaacttctgtccttcctcggggctcggcacacgcactggctccagtgtggactgtgagaagcttcagttccgcttccgctggctgcacttcatggtggaagtgcagaatgacctgactgccaagaaaatggtcgcggctttgatggagatggcagggcgggaccaccgtgccctggactgctttgtggtggtcatcctctctcatggctgccaggccagccacctgcagttcccaggtgccgtctatggcacagacggatgctccgtgtcggtcgagaagattgtgaacatcttcagtgggactggctgtcctagcctgggagggaagccgaagctgttcttcatccaggcctgtggtggcgagcagaaagaccatggctttgaggtggcctgcacttcctctcgaggcagggacttagacagtgactctgagccagatgctgtcccataccaggaaggcccaaggccctttgaccagctggatgccgtgtcaagtttgcccacccccagcgacatccttgtatcctattccaccttcccaggttttgtctcctggagagacaagaagagcggctcctggtacatagagaccttggatggtgtcctggagcagtgggctcactctgaagacctgcagtccctccttctcagggtcgcccatgcagtttctgagaaagggatttataaacagattcctggctgttttaacttcctccggaaaaagctgttttttaaaacnnnnnnnnnnnnnnnnnnnnnnnnnnnnnnnnnnnnnnnnnnnnnnnnnnnn

SEQ ID NO: 3575 - DNA, 754 bp, Cricetulus griseus
  misc_feature (1)..(40): n is a, c, g, or t
  misc_feature (705)..(754): n is a, c, g, or t
nnnnnnnnnnnnnnnnnnnnnnnnnnnnnnnnnnnnnnnntagtggttgactttctctcctacaagctctcccagaaaggatacagctggagtcagtttagtgatgtcgaagagaacaggactgaggccccagaaggaactgaatcagagagggagacccccagtgccatcaatggcaacccatcctggcacctggcggacagccccgcggtaaatggagccactggccacagcagcagtttggatgcacgggaggtgatccccatggcagccgtaaagcaagcgctgagagaggccggcgatgagtttgagctgcggtaccggcgggcgttcagtgatctaacatcccagcttcatataaccccagggactgcatatcaaagctttgaacaggtagtgaatgaactcttccgggatggggtaaactggggtcgcattgtggcctttttctccttcggtggagccctctgtgtggaaagcgtagacaaggagatgcaggtattggtgagtcggatcgcaagttggatggccacctacctgaatgaccacctagagccttggatccaggacaacggcggctgggacactttcgtggaactctacggaaacaatgcagcagctgagagccggaaaggccaggagcgcttcaaccgctggttcctgacgggcatgactgtggctggtgtggttctgctgggctctctnnnnnnnnnnnnnnnnnnnnnnnnnnnnnnnnnnnnnnnnnnnnnnnnnn

SEQ ID NO: 3576 - DNA, 391 bp, Cricetulus griseus
atgtccggggctgcacgcgcgctacactgactggctcagcgtgtgcctaccctacgccggcaggcgcgggtaacccgttgaaccccattcgtgatggggatcggggattgcaattattccccatgaacgaggaattcccagtaagtgcgggtcataagcttgcgttgattaagtccctgccctttgtacacaccgcccgtcgctactaccgattggatggtttagtgaggccctcggatcggccccgccggggtcggcccacggcctggcggaggctgagaagacggtcgaacttgactatctagaggaagtaaaagtcgtaacaaggtttccgtaggtgaacctgcggaaggatcattaacgaaaaagagagagaaaaagccccggcggg

SEQ ID NO: 3577 - DNA, 1869 bp, Mus musculus
tacctggttgatcctgccagtagcatatgcttgtctcaaagattaagccatgcatgtctaagtacgcacggccggtacagtgaaactgcgaatggctcattaaatcagttatggttcctttggtcgctcgctcctctcctacttggataactgtggtaattctagagctaatacatgccgacgggcgctgaccccccttcccggggggggatgcgtgcatttatcagatcaaaaccaacccggtgagctccctcccggctccggccgggggtcgggcgccggcggcttggtgactctagataacctcgggccgatcgcacgccccccgtggcggcgacgacccattcgaacgtctgccctatcaactttcgatggtagtcgccgtgcctaccatggtgaccacgggtgacggggaatcagggttcgattccggagagggagcctgagaaacggctaccacatccaaggaaggcagcaggcgcgcaaattacccactcccgacccggggaggtagtgacgaaaaataacaatacaggactctttcgaggccctgtaattggaatgagtccactttaaatcctttaacgaggatccattggagggcaagtctggtgccagcagccgcggtaattccagctccaatagcgtatattaaagttgctgcagttaaaaagctcgtagttggatcttgggagcgggcgggcggtccgccgcgaggcgagtcaccgcccgtccccgccccttgcctctcggcgccccctcgatgctcttagctgagtgtcccgcggggcccgaagcgtttactttgaaaaaattagagtgttcaaagcaggcccgagccgcctggataccgcagctaggaataatggaataggaccgcggttctattttgttggttttcggaactgaggccatgattaagagggacggccgggggcattcgtattgcgccgctagaggtgaaattcttggaccggcgcaagacggaccagagcgaaagcatttgccaagaatgttttcattaatcaagaacgaaagtcggaggttcgaagacgatcagataccgtcgtagttccgaccataaacgatgccgactggcgatgcggcggcgttattcccatgacccgccgggcagcttccgggaaaccaaagtctttgggttccggggggagtatggttgcaaagctgaaacttaaaggaattgacggaagggcaccaccaggagtgggcctgcggcttaatttgactcaacacgggaaacctcacccggcccggacacggacaggattgacagattgatagctctttctcgattccgtgggtggtggtgcatggccgttcttagttggtggagcgatttgtctggttaattccgataacgaacgagactctggcatgctaactagttacgcgacccccgagcggtcggcgtcccccaacttcttagagggacaagtggcgttcagccacccgagattgagcaataacaggtctgtgatgcccttagatgtccggggctgcacgcgcgctacactgactggctcagcgtgtgcctaccctgcgccggcaggcgcgggtaacccgttgaaccccattcgtgatggggatcggggattgcaattattccccatgaacgaggaattcccagtaagtgcgggtcataagcttgcgttgattaagtccctgccctttgtacacaccgcccgtcgctactaccgattggatggtttagtgaggccctcggatcggccccgccggggtcggcccacggccctggcggagcgctgagaagacggtcgaacttgactatctagaggaagtaaaagtcgtaacaaggtttccgtaggtgaacctgcggaaggatcatta

SEQ ID NO: 3578 - DNA, 1920 bp, Rattus norvegicus
tcgcgctccttacctggttgatcctgccagtagcatatgcttgtctcaaagattaagccatgcatgtctaagtacgcacggccggtacagtgaaactgcgaatggctcattaaatcagttatggttcctttgtcgctcgctcctctcctacttggataactgtggtaattctagagctaatacatgccgacgggcgctgaccccccttcccgtgggggggacgcgtgcatttatcagatcaaaaccaacccggtcagccccctcccggctccggccgggggtcgggcgccggacggctttggtgactctagataacctcgggccgatcgcacgccctccgtggcggcgacgacccattcgaacgtctgccctatcaactttcgatggtagtcgccgtgcctaccatggtgaccacgggtgacggggaatcagggttcgattccggagagggagcctgagaaacggctaccacatccaaggaaggcagcaggcgcgcaaattacccactcccgacccggggaggtagtgacgaaaaataacaatacaggactctttcgaggccctgtaattggaatgagtccactttaaatcctttaacgaggatccattggagggcaagtctggtgccagcagccgcggtaattccagctccaatagcgtatattaaagttgctgcagttaaaaagctcgtagttggatcttgggagcgggcgggcggtccgccgcgaggcgagtcaccgcccgtccccgccccttgcctctcggcgccccctcgatgctcttagctgagtgtcccgcggggcccgaagcgtttactttgaaaaaattagagtgttcaaagcaggcccgagccgcctagataccgcagctaggaataatggaataggaccgcggttctattttgttggttttcggaactgaggccatgattaagagggacggccgggggcattcgtattgcgccgctagaggtgaaattcttggaccggcgcaagacggaccagagcgaaagcatttgccaagaatgttttcattaatcaagaacgaaagtcggaggttcgaagacgatcagataccgtcgtagttccgaccataaacgatgccgactggcgatgcggcggcgttattcccatgacccgccgggcagcttccgggaaaccaaagtctttgggttccggggggagtatggttgcaaagctgaaacttaaaggaattgacggaagggcaccaccaggagtgggcctgcggcttaatttgactcaacacgggaaacctcacccggcccggacacggacaggattgacagattgatagctctttctcgattccgtgggtggtggtgcatggccgttcttagttggtggagcgatttgtctggttaattccgataacgaacgagactctggcatgctaactagttacgcgacccccgagcggtcggcgtcccccaacttcttagagggacaagtggcgttcagccacccgagattgagcaataacaggtctgtgatgcccttagatgtccggggctgcacgcgcgctacactgactggctcagcgtgtgcctaccctacgccggcaggcgcgggtaacccgttgaaccccattcgtgatggggatcggggattgcaattattccccatgaacgaggaattcccagtaagtgcgggtcataagcttgcgttgattaagtccctgccctttgtacacaccgcccgtcgctactaccgattggatggtttagtgaggccctcggatcggccccgccggggtcggcccacggccttgcggagcgctgagaagacggtcgaacttgactatctagaggaagtaaaagtcgtaacaaggtttccgtaggtgaacctgcggaaggatcattaacggagaaggccgaggggggtcgtcgtcccgtccctcttg

SEQ ID NO: 3579 - DNA, 1869 bp, Mus musculus; identical to SEQ ID NO: 3577

SEQ ID NO: 3580 - DNA, 1920 bp, Rattus norvegicus; identical to SEQ ID NO: 3578

SEQ ID NO: 3581 - DNA, 1869 bp, Mus musculus; identical to SEQ ID NO: 3577

SEQ ID NO: 3582 - DNA, 1920 bp, Rattus norvegicus; identical to SEQ ID NO: 3578

SEQ ID NO: 3583 - DNA, 1846 bp, Cricetinae gen. sp.; identical to SEQ ID NO: 410
  misc_feature (1281)..(1299): n is a, c, g, or t
  misc_feature (1808)..(1823): n is a, c, g, or t

SEQ ID NO: 3584 - DNA, 1109 bp, Mus musculus
ccccgggctgtattcccctccatcgtgggccgctctaggcaccaaggtgtgatggtgggaatgggtcagaaggactcctatgtgggtgacgaggcccagagcaagagaggtatcctgaccctgaagtaccccattgaacatggcattgttaccaactgggacgacatggagaagatctggcaccacaccttctacaatgagctgcgtgtggcccctgaggagcaccctgtgctgctcaccgaggcccccctgaaccctaaggccaaccgtgaaaagatgacccagatcatgtttgagaccttcaacaccccagccatgtacgtagccatccaggctgtgctgtccctgtatgcctctggtcgtaccacgggcattgtgatggactccggtgacggggtcacccacactgtgcccatctacgagggctatgctctccctcacgccatcctgcgtctggacttggctggccgggacctgacggactacctcatgaagatcctgaccgagcgtggctacagcttcaccaccacagctgagagggaaatcgtgcgtgacatcaaagagaagctgtgctatgttgctctagacttcgagcaggagatggccactgccgcatcctcttcctccctggagaagagctatgagctgcctgacggccaagtcatcactattggcaacgagcggttccgatgccctgaggctcttttccagccttccttcttgggtatggaatcctgtggcatccatgaaactacattcaattccatcatgaagtgtgacgttgacatccgtaaagacctctatgccaacacagtgttgtctggtggtaccaccatgtacccaggcattgctgacaggatgcagaaggagattactgctctggctcctagcaccatgaagatcaagatcattgctcctcctgagcgcaagtactctgtgtggatcggtggctccatcttggcctcactgtccaccttccagcagatgtggatcagcaagcaggagtacgatgagtccggcccctccatcgtgcaccgcaagtgcttctaggcggactgttactgagctgcgttttacaccctttctttgacaaaacctaacttgcgcag

SEQ ID NO: 3585 - DNA, 4100 bp, Rattus norvegicus
  misc_feature (3859)..(3859): n is a, c, g, or t
acctcttcctcaactcacttctctctactctcacttttttttttcttcttcttttttttttttttttttttttttttttttgcaaaagaagggggtaaaaaaatgctgcactgtcgggcgaggccggtgagtgagcgagccggagccaatcagcgcccgccgttccgaaattgccttttatggctcgagtggccgctgtggcgtcctataaaacccggcggcgcaacgcgcgccactgtcgagtccgcgtccacccgcgagtacaacctccttgcagctcctccgtcccggtccacacccgccaccaggtaagcagggacgtcgggcccagcgggccccaactttaccttggccactacctcgctgcaggatcgtgaggaacactcagaagggacaccgtagaggggtggagcgtggtaccgggccgcggagcagctggcaaagcttaactttcccggcccctagggtgtagagtgtttgcagtcgtattcccgcggtgtggacactcgtgggtacgctcctgcttggtgcgcggggcttggggacacactagagtcgcggtgtgggcatttggagagccggtgcggctgcgggtgttaagccgcatctgtccaccttgaggggcaacagtattggggtcaggcgttacaatcacgctttgatggcctatgggtctttgtccaaaccggttttgccattcggcttggcgggcgcggcggggccgctcggccgggtgggggctgggatgccattgcgcgtgcgcgctctatcactgggcattggggccgtgcgcgctggggagggaactcttcctctccccctcttccgagttaagagttgcgcgtgcgtattgagactaggagcgcggccgccccgggttgggcgagggcgggccgtccaccggaaggggcggggtcgtagcggctaggcgcctgctcgcgcttcctgctgggtgtggtcgcctcccgcgcgcgcactagccgcccgtcgcctcagtgtaggcgggcctgtgcccgtttggggaggggcggaggcctggcttcctgccgtgggtccgcctccgggccagcgtttgccttttatggtaataatgcggctgtcctgcgcttcctttgtcccctgagcttgggcgcgcccctggcggctcgaggccgcggctcgccggaagtgggcagggcggcagcggctgctcttggcggctccgcggtgaccatagccctcttttgtgccttgatagttcgccatggatgacgatatcgctgcgctcgtcgtcgacaacggctccggcatgtgcaaggccggcttcgcgggcgacgatgctccccgggccgtcttcccctccatcgtgggccgccctaggcaccaggtaagtgaccctttactttgggagtggcagccctagggttttcttgggggtcgatgccagtgctgagaacgttgttctcctccgcagggtgtgatggtgggtatgggtcagaaggactcctacgtgggcgacgaggcccagagcaagagaggcatcctgaccctgaagtaccccattgaacacggcattgtaaccaactgggacgatatggagaagatttggcaccacactttctacaatgagctgcgtgtggcccctgaggagcaccctgtgctgctcaccgaggcccctctgaaccctaaggccaaccgtgaaaagatgacccaggtcagtatcctgggtgaccctccccttcttattgggtcaacttctcagcacgcccttctctaattgtctttcttctgccatgtcccataggactctcttctatgagctgagtctcccttggaactttgcagtttctgctctttcccagatgaggtcttttttttctctcgatcgcctttctgactaggtgttttaaacccctacagtgctgtgggtgtaggtactaacaatggctcgtgtgacaaagctaatgaggctggtgataaatggccttggagtgtgtattcagtagatgacagtaggtctaaatggagcccctgtcctgatactcccagcacacttaacttagctgtgttcttgccctctttgcatgtctcactcaaatctatccttacagtctcacctgccctgagtgtttcttgtggctttaggagcttgacaatactgtattcctttctctacagatcatgtttgagaccttcaacaccccagccatgtacgtagccatccaggctgtgttgtccctgtatgcctctggtcgtaccactggcattgtgatggactccggagacggggtcacccacactgtgcccatctatgagggttacgcgctccctcatgccatcctgcgtctggacctggctggccgggacctgacagactacctcatgaagatcctgaccgagcgtggctacagcttcaccaccacagctgagagggaaatcgtgcgtgacattaaagagaagctgtgctatgttgccctagacttcgagcaagagatggccactgccgcatcctcttcctccctggagaagagctatgagctgcctgacggtcaggtcatcactatcggcaatgagcggttccgatgccccgaggctctcttccagccttccttcctgggtaagttgtagtctcgtcccttctccatctaaaggtgaccaatgctggaggccacactgtaactctgatctcttgcttttcctttcaggtatggaatcctgtggcatccatgaaactacattcaattccatcatgaagtgtgacgttgacatccgtaaagacctctatgccaacacagtgctgtctggtggcaccaccatgtacccaggcatcgctgacaggatgcagaaggagattactgccctggctcctagcaccatgaagatcaaggtaagcagccttagcctggacccatagtggggtgtggtcagccctgtagttgtagccaactctcttggcttaaggaacaacccagcatccagaatgctcacaatcactgtcttgctttcttcagatcattgctcctcctgagcgcaagtactctgtgtggattggtggctctatcctggcctcactgtccaccttccagcagatgtggatcagcaagcaggagtacgatgagtccggcccctccatcgtgcaccgcaaatgcttctaggcggactgttactgagctgcgttttacaccctttctttgacaaaacctaacttgcgcagaaaaaaaaaatgagacatttggcatggctttattgtttttttgttttttgtttttgttttttttaaattttttttttaaaaaggttttttttttttgttttgttttggcgcttttgactcaaggatttaaaaactggaacggtgaaggcgaccgcagttggttggagcaaacatcccccaaagttctacaatgtggctgaggactttgattgtacattgttttttgtttttggtttttttaatagtcactccaagtatccacggcatagatggttacaggaagtccctcaccctcccaaaagccacccccaactcctaaggggaggatggctgcatccatgccctgagtccacaccgggaaggtgacagcattgcttctgtgtaaattatgtacttgcaaacatttttttaaatcttccgccttaatacttcatttttgtttttaatttctgaatggtcagccattcgtggcctgccccttttttttgtccccccaacttgatgtatgaaggctttggtctccctgggagtggtttgaggtgttgaggcgccagggctggcctgtacactgacgtgagaccgttttaataaaagtgcacaccttacaaacaagtttgtggctctgtggcttctactgggtgtggggagcaggctgggtgggtgtgnaactccacgtgggggaggggcaatttagggtgggctggccttgcctgatagctagtgggagggctaaaggatcatgatctttaatgaggtctcataaataccccaccttcggtcttgagggagggtgaggagttgggaaggtatctccctgacacctggccaagctggcctcatcaaccctactttcctcagccagggggaggtccacatcctcccacctgcatagcttgcgtctagaggc

SEQ ID NO: 3586 - DNA, 1846 bp, Cricetinae gen. sp.; identical to SEQ ID NO: 410
  misc_feature (1281)..(1299): n is a, c, g, or t
  misc_feature (1808)..(1823): n is a, c, g, or t

SEQ ID NO: 3587 - DNA, 1109 bp, Mus musculus; identical to SEQ ID NO: 3584

SEQ ID NO: 3588 - DNA, 4100 bp, Rattus norvegicus; identical to SEQ ID NO: 3585
  misc_feature (3859)..(3859): n is a, c, g, or t

SEQ ID NO: 3589 - DNA, 1846 bp, Cricetinae gen. sp.; identical to SEQ ID NO: 410
  misc_feature (1281)..(1299): n is a, c, g, or t
  misc_feature (1808)..(1823): n is a, c, g, or t

SEQ ID NO: 3590 - DNA, 1109 bp, Mus musculus; identical to SEQ ID NO: 3584

SEQ ID NO: 3591 - DNA, 4100 bp, Rattus norvegicus; identical to SEQ ID NO: 3585
  misc_feature (3859)..(3859): n is a, c, g, or t

SEQ ID NO: 3592 - DNA, 1049 bp, Escherichia coli
atggctcaccgcccacgctggacattgtcgcaagtcacagaattatttgaaaaaccgttgctggatctgctgtttgaagcgcagcaggtgcatcgccagcatttcgatcctcgtcaggtgcaggtcagcacgttgctgtcgattaagaccggagcttgtccggaagattgcaaatactgcccgcaaagctcgcgctacaaaaccgggctggaagccgagcggttgatggaagttgaacaggtgctggagtcggcgcgcaaagcgaaagcggcaggatcgacgcgcttctgtatgggcgcggcgtggaagaatccccacgaacgcgatatgccgtacctggaacaaatggtgcagggggtaaaagcgatggggctggaggcgtgtatgacgctgggcacgttgagtgaatctcaggcgcagcgcctcgcgaacgccgggctggattactacaaccacaacctggacacctcgccggagttttacggcaatatcatcaccacacgcacttatcaggaacgcctcgatacgctggaaaaagtgcgcgatgccgggatcaaagtctgttctggcggcattgtgggcttaggcgaaacggtaaaagatcgcgccggattattgctgcaactggcaaacctgccgacgccgccggaaagcgtgccaatcaacatgctggtgaaggtgaaaggcacgccgcttgccgataacgatgatgtcgatgcctttgattttattcgcaccattgcggtcgcgcggatcatgatgccaacctcttacgtgcgcctttctgccggacgcgagcagatgaacgaacagactcaggcgatgtgctttatggcaggcgcaaactcgattttctacggttgcaaactgctgaccacgccgaatccggaagaagataaagacctgcaactgttccgcaaactggggctaaatccgcagcaaactgccgtgctggcaggggataacgaacaacagcaacgtcttgaacaggcgctgatgaccccggacaccgacgaatattacaacgcggcagcattatgagctggcag

SEQ ID NO: 3593 - DNA, 1049 bp, Escherichia coli; identical to SEQ ID NO: 3592

SEQ ID NO: 3594 - DNA, 1049 bp, Escherichia coli; identical to SEQ ID NO: 3592

SEQ ID NO: 3595 - DNA, 751 bp, Escherichia coli
atggcaacggttaataaacaagccattgcagcggcatttggtcgggcagccgcacactatgagcaacatgcagatctacagcgccagagtgctgacgccttactggcaatgcttccacagcgtaaatacacccacgtactggacgcgggttgtggacctggctggatgagccgccactggcgggaacgtcacgcgcaggtgacggccttagatctctcgccgccaatgcttgttcaggcacgccagaaggatgccgcagaccattatctggcgggagatatcgaatccctgccgttagcgactgcgacgttcgatcttgcatggagcaatctcgcagtgcagtggtgcggtaatttatccacggcactccgcgagctgtatcgggtggtgcgccccaaaggcgtggtcgcgtttaccacgctggtgcagggatcgttacccgaactgcatcaggcgtggcaggcggtggacgagcgtccgcatgctaatcgctttttaccgccagatgaaatcgaacagtcgctgaacggcgtgcattatcaacatcatattcagcccatcacgctgtggtttgatgatgcgctcagtgccatgcgttcgctgaaaggcatcggtgccacgcatcttcatgaagggcgcgacccgcgaatattaacgcgttcgcagttgcagcgattgcaactggcctggccgcaacagcaggggcgatatcctctgacgtatcatctttttttgggagtgattgctcgtg

SEQ ID NO: 3596 - DNA, 751 bp, Escherichia coli; identical to SEQ ID NO: 3595

SEQ ID NO: 3597 - DNA, 661 bp, Escherichia coli
gtgagtaaacgttattttgtcaccggaacggataccgaagtggggaaaactgtcgccagttgtgcacttttacaagccgcaaaggcagcaggctaccggacggcaggttataaaccggtcgcctctggcagcgaaaagaccccggaaggtttacgcaatagcgacgcgctggcgttacagcgcaacagcagcctgcagctggattacgcaacagtaaatccttacaccttcgcagaacccacttcgccgcacatcatcagcgcgcaagagggcagaccgatagaatcattggtaatgagcgccggattacgcgcgcttgaacaacaggctgactgggtgttagtggaaggtgctggcggctggtttacgccgctttctgacactttcacttttgcagattgggtaacacaggaacaactgccggtgatactggtagttggtgtgaaactcggctgtattaatcacgcgatgttgactgcacaggtaatacaacacgccggactgactctggcgggttgggtggcgaacgatgttacgcctccgggaaaacgtcacgctgaatatatgaccacgctcacccgcatgattcccgcgccgctgctgggagagatcccctggcttgcagaaaatccagaaaatgcggcaaccggaaagtacataa

SEQ ID NO: 3598 - DNA, 661 bp, Escherichia coli; identical to SEQ ID NO: 3597

SEQ ID NO: 3599 - DNA, 1032 bp, Enterobacteria phage P1
atgtccaatttactgaccgtacaccaaaatttgcctgcattaccggtcgatgcaacgagtgatgaggttcgcaagaacctgatggacatgttcagggatcgccaggcgttttctgagcatacctggaaaatgcttctgtccgtttgccggtcgtgggcggcatggtgcaagttgaataaccggaaatggtttcccgcagaacctgaagatgttcgcgattatcttctatatcttcaggcgcgcggtctggcagtaaaaactatccagcaacatttgggccagctaaacatgcttcatcgtcggtccgggctgccacgaccaagtgacagcaatgctgtttcactggttatgcggcggatccgaaaagaaaacgttgatgccggtgaacgtgcaaaacaggctctagcgttcgaacgcactgatttcgaccaggttcgttcactcatggaaaatagcgatcgctgccaggatatacgtaatctggcatttctggggattgcttataacaccctgttacgtatagccgaaattgccaggatcagggttaaagatatctcacgtactgacggtgggagaatgttaatccatattggcagaacgaaaacgctggttagcaccgcaggtgtagagaaggcacttagcctgggggtaactaaactggtcgagcgatggatttccgtctctggtgtagctgatgatccgaataactacctgttttgccgggtcagaaaaaatggtgttgccgcgccatctgccaccagccagctatcaactcgcgccctggaagggatttttgaagcaactcatcgattgatttacggcgctaaggatgactctggtcagagatacctggcctggtctggacacagtgcccgtgtcggagccgcgcgagatatggcccgcgctggagtttcaataccggagatcatgcaagctggtggctggaccaatgtaaatattgtcatgaactatatccgtaacctggatagtgaaacaggggcaatggtgcgcctgctggaagatgccgattag

SEQ ID NO: 3600 - DNA, 1032 bp, Enterobacteria phage P1; identical to SEQ ID NO: 3599

SEQ ID NO: 3601 - DNA, 1840 bp, Bacillus subtilis
atgtcaaacgaaacaattaaattagtcattgcgggaccgcgtggaagaatggggcaggaagctgttaaattggcagaacgaacaccacattttgaccttgtaggggccatagaccatacatacgatcagcaaaaattatctgatgtgatgcctgttgagtcagatgctttcatttacacagatatccatgcctgttttacagaaacacaaccggatgtcttgattgatttaacaacgcccgaaatcggaaaagtacatacaaaaattgcattagagcacggagtccgtccagttgtcggaacaaccggtttctcagaagctgatttaaaagagctcacatctttaacagaagaaaaagggatcggagccatcatcgcgccaaattttgcgctcggtgcgatactgatgatgaaattttcaaaaatggctgccaactattttgaggatgttgagattattgagcttcatcatgaccagaagcttgacgcaccaagcggaactgcgcttaaaacagcggaaatgatttcagaagtccgtaaagaaaagcagcaaggacatccggatgaaaaagaaattctcccaggagcaagaggagcggagcaaaacggtattcgcttgcacaggcttcagatacgccatgattcttataaccgtgcttctttcatgtcaggcgttaaactgtcagtcgaacaagtcatgaagattgatcagcttgtgtatggtttagaaaatatcattgattagacggggggataaacaatgaaaattgctttgatcgcgcatgacaagaaaaaacaggatatggttcaatttacgactgcctatcgggatattttaaagaatcatgatctatacgcaaccggaaccacagggttgaaaattcatgaggcgacaggtcttcaaattgaacgttttcaatccggccctttagggggagaccagcaaatcggtgcactgatcgctgccaatgcactcgatcttgtcatttttttgcgcgacccgctgaccgcgcagccgcatgaaccggatgtctcggcattaatccgtttatgtgatgtgtattccattccgctcgccacaaatatgggtactgcggaaattcttgtgcgcacacttgatgaaggtgttttcgaattccgtgaccttcttcggggagaagagccgaatgtataatgctgacgttcttgcttttggcgcccacagtgatgatgtcgagatcggaatgggcggcacaatagcgaagtttgtcaaacaggaaaaaaaagtaatgatatgcgatttgacagaagcggaactctcttctaacggtacggtcagtttgcgtaaagaagaagcagctgaagcagcccgcatattaggcgcagataaaagaattcagctaacgcttccagaccgcggcctaataatgagtgatcaggcaattcggtcaattgtcactgtcatcagaatctgtcggccaaaagcggtttttatgccgtataaaaaggatcgccatccggatcacggcaatgcggctgcactggtggaagaagcgatcttttccgccggaatccataaatataaagacgaaaaaagccttccggcgcataaagtcagcaaggtttactattatatgataaatggttttcatcagccggattttgttattgatatctcggatacaatagaggcaaagaaacaaagcctcaacgcctacaaaagccagtttatcccgtcaaaggattccgtttctactcctctgacgaatgggtatattgaaatcgttgaagcgagagaaaagctttacggtaaagaagcgggcgtggagtatgccgaagtttcttttccaaacggatgctga

SEQ ID NO: 3602 - DNA, 1840 bp, Bacillus subtilis; identical to SEQ ID NO: 3601

SEQ ID NO: 3603 - DNA, 1840 bp, Bacillus subtilis; identical to SEQ ID NO: 3601

SEQ ID NO: 3604 - DNA, 1266 bp, Cricetus cricetus
ggctctctgctcctccctgttctagagacagccgcatctttccgtgcagtgccagcctcgctccggagacgcaatggtgaaggtcggcgtgaacggatttggccgtattggacgcctggttaccagggctgccttcacttctggcaaagtggaagttgttgccatcaatgaccccttcattgacctcaactacatggtctacatgttccagtatgactctacccatggcaagttcaaaggcacagtcaaggctgagaatggaaagcttgtcatcaacgggaaggccatcaccatcttccaggagcgagatcccgccaacatcaaatggggtgatgctggcgccgagtatgttgtggaatctactggcgtcttcaccaccatggagaaggctggggcccacttgaagggcggggccaagagggtcatcatctccgccccttctgctgatgcccccatgtttgtgatgggtgtgaaccaagacaagtatgacaactccctcaagattgtcagcaatgcgtcctgcaccaccaactgcttagcccccctggccaaggtcatccatgacaactttggcattgtggaaggactcatgaccacggtccatgccatcactgccacccagaagactgtggatggcccctccggaaagctgtggcgtgatggccgtggggctgcccagaacatcatccctgcatccactggcgctgccaaggctgtgggcaaagtcatcccagagctgaacgggaagctgactggcatggccttccgtgttcctacccccaacgtgtccgttgtggatctgacatgtcgcctggagaaacctgccaagtatgaggacatcaagaaggtggtgaagcaggcatctgagggcccactgaagggcatcctgggctacaccgaggaccaggttgtctcctgcgacttcaacagtgactcccactcttccacctttgatgctggggctggcattgctctcaatgacaactttgtaaagctcatttcctggtatgacaatgaatttggctacagcaacagagtggtggacctcatggcctacatggcctccaaggagtaagaagcccaccctggaccatccaccccagcaaggactcgagcaagagggaggccctggctgctgagcagtccctgtccaataacccccacaccgatcatctccctcacagtttccatcccagacccccagaataaggaggggcttagggagccctactctcttgaataccatcaataaagttcactgcaccc

SEQ ID NO: 3605 - DNA, 1228 bp, Mus musculus
acagccgcatcttcttgtgcagtgccagcctcgtcccgtagacaaaatggtgaaggtcggtgtgaacggatttggccgtattgggcgcctggtcaccagggctgccatttgcagtggcaaagtggagattgttgccatcaacgaccccttcattgacctcaactacatggtctacatgttccagtatgactccactcacggcaaattcaacggcacagtcaaggccgagaatgggaagcttgtcatcaacgggaagcccatcaccatcttccaggagcgagaccccactaacatcaaatggggtgaggccggtgctgagtatgtcgtggagtctactggtgtcttcaccaccatggagaaggccggggcccacttgaagggtggagccaaacgggtcatcatctccgccccttctgccgatgcccccatgtttgtgatgggtgtgaaccacgagaaatatgacaactcactcaagattgtcagcaatgcatcctgcaccaccaactgcttagcccccctggccaaggtcatccatgacaactttggcattgtggaagggctcatgaccacagtccatgccatcactgccacccagaagactgtggatggcccctctggaaagctgtggcgtgatggccgtggggctgcccagaacatcatccctgcatccactggtgctgccaaggctgtgggcaaggtcatcccagagctgaacgggaagctcactggcatggccttccgtgttcctacccccaatgtgtccgtcgtggatctgacgtgccgcctggagaaacctgccaagtatgatgacatcaagaaggtggtgaagcaggcatctgagggcccactgaagggcatcttgggctacactgaggaccaggttgtctcctgcgacttcaacagcaactcccactcttccaccttcgatgccggggctggcattgctctcaatgacaactttgtcaagctcatttcctggtatgacaatgaatacggctacagcaacagggtggtggacctcatggcctacatggcctccaaggagtaagaaaccctggaccacccaccccagcaaggacactgagcaagagaggccctatcccaactcggcccccaacactgagcatctccctcacaatttccatcccagacccccataataacaggaggggcctagggagccctccctactctcttgaataccatcaataaagttcgctgcacccac

SEQ ID NO: 3606 - DNA, 1233 bp, Rattus norvegicus
ggtcagtgccggcctcgtctcatagacaagatggtgaaggtcggtgtcaacggatttggccgtattggccgcctggtcaccagggctgccttctcttgtgacaaagtggacattgttgccatcaacgaccccttcattgacctcaactacatggtctacatgttccagtatgattctacccacggcaagttcaatggcacagtcaaggctgagaatgggaagctggtcatcaatgggaaacccatcaccatcttccaggagcgcgatcccgctaacatcaaatggggtgatgctggtgctgagtatgtcgtggagtctactggcgtcttcaccaccatggagaaggctggggctcacctgaagggtggtgccaaaagggtcatcatctccgccccttccgctgatgcccccatgtttgtgatgggtgtgaaccacgagaaatatgacaactccctcaagattgtcagcaatgcatcctgcaccaccaactgcttagcccccctggccaaggtcatccatgacaactttggcatcgtggaagggctcatgaccacagtccatgccatcactgccactcagaagactgtggatggcccctctggaaagctgtggcgtgatggccgtggggcagcccagaacatcatccctgcatccactggtgctgccaaggctgtgggcaaggtcatcccagagctgaacgggaagctcactggcatggccttccgtgttcctacccccaatgtatccgttgtggatctgacatgccgcctggagaaacctgccaagtatgatgacatcaagaaggtggtgaagcaggcggccgagggcccactaaagggcatcctgggctacactgaggaccaggttgtctcctgtgacttcaacagcaactcccattcctccacctttgatgctggggctggcattgctctcaatgacaactttgtgaagctcatttcctggtatgacaatgaatatggctacagcaacagggtggtggacctcatggcctacatggcctccaaggagtaagaaacccctggaccacccagcccagcaaggatactgagagcaagagagaggccctcagttgcctgagagtccccatcccaactcagcccccaacactgagcactctccctcacaattccatcccagaccccataacaacaggaggggcctggggagccctcccttctctcgaataccatcaataaagttcgctgcaccctc

SEQ ID NO: 3607 - DNA, 1266 bp, Cricetus cricetus; identical to SEQ ID NO: 3604

SEQ ID NO: 3608 - DNA, 1228 bp, Mus musculus; identical to SEQ ID NO: 3605

SEQ ID NO: 3609 - DNA, 1233 bp, Rattus norvegicus; identical to SEQ ID NO: 3606

SEQ ID NO: 3610 - DNA, 1266 bp, Cricetus cricetus; identical to SEQ ID NO: 3604

SEQ ID NO: 3611 - DNA, 1228 bp, Mus musculus; identical to SEQ ID NO: 3605

SEQ ID NO: 3612 - DNA, 1233 bp, Rattus norvegicus; identical to SEQ ID NO: 3606

SEQ ID NO: 3613 - DNA, 984 bp, Bacillus subtilis
atgacattgttcttacacggcacaagcagacaaaatcaacatggtcatttagaaatcggaggtgtggatgctctctatttagcggagaaatatggtacacctctttacgtatatgatgtggctttaatacgtgagcgtgctaaaagctttaagcaggcgtttatttctgcagggctgaaagcacaggtggcatatgcgagcaaagcattctcatcagtcgcaatgattcagctcgctgaggaagagggactttctttagatgtcgtatccggagagagctatatacggctgttgcagcaggctttccggcagaacgcatccactttcatggaaacaataagagcagggaagaactgcggatggcgcttgagcaccgcatcggctgcattgtggtggataatttctatgaaatcgtcgcttcttgaagacctatgtaaagaaacgggtcactccatcgatgttcttcttcggatcacgcccggagtagaagcgcatacgcatgactacattacaacgggccaggaagattcaaagtttggtttcgatcttcataacggacaaactgaacgggccattgaacaagtattacaatcggaacacattcagctgctgggtgtccattgccatatcggctcgcaaatctttgatacggccggttttgtgttagcagcggaaaaaatcttcaaaaaactagacgaatggagagattcatattcatttgtatccaaggtgctgaatcttggaggaggtttcggcattcgttatacggaagatgatgaaccgcttcatgccactgaatacgttgaaaaaattatcgaagctgtgaaagaaaatgcttcccgttacggttttgacattccggaaatttggatcgaaccgggccgttctctcgtgggagacgcaggcacaactctttatacggttggctctcaaaaagaagtggataagctgtacaatcgtttcatcattcggcgtgcgaattaa

SEQ ID NO: 3614 - DNA, 984 bp, Bacillus subtilis; identical to SEQ ID NO: 3613

SEQ ID NO: 3615 - DNA, 984 bp, Bacillus subtilis; identical to SEQ ID NO: 3613

SEQ ID NO: 3616 - DNA, 1318 bp, Bacillus subtilis
atgaaagaggagacattttatcttgtccgtgaagatgtattgcccgatgcaatgagaaaaacattagaagtcaaaaagctgcttgatcgaaaaaaagcagattcagtagcagatgccgttcaaaaggtcgatttaagtagaagtgcgttttataaatacagggatgctgtttttccattctacaccatggtaaaagaacaaattatcacacttttctttcatttggaggataggtcaggtgcgttatctcagcttcttcaggcggtagctgattctggaagcaacgttctttccattcaccagaccattccgcttcaaggcagagcaaatgtgacactgtctatcagtacgtcggcaatggaagaagacattcatacattaatgaataagctcaggaagtttgattttgtagaaaaggttgaaatattaggttcaggtgcataagggagagaaaatcgtcatgaaagtcggttatttaggtccagcagctacatttacacatctagcagtcagttcttgttttcaaaacggcgccgaacatgttgcttaccgcaccattccggagtgtatagatgcagccgttgcaggcgaagttgattttgcttttgttcctttggaaaatgctttagaaggatctgttaatctaacaatagactatttaatacatgaacagcctttgccaatcgtgggtgaaatgacgttgccgattcaccagcacttgctcgtccatccctcaagagagaatgcatggaaagagctcgacaaaatttactcacattcacacgcgattgcgcaatgccataaatttcttcatcgacattttccttccgttccatatgaatacgccaattctaccggggcggcagcaaagtttgtcagtgaccatcccgagctgaatatcggggtcattgccaatgatatggcagcttctacatacgaattaaaaatcgtgaaacgggatatacaggattatagggacaatcatacaagatttgttatcctgtctcccgatgaaaacatatcttttgaagtgaattcaaaattgagctctaggcccaaaacgaccttaatggtcatgctgccgcaggatgatcagtccggggcgctgcatagagtgctgtctgcattttcttggagaaatttaaacctgtcaaaaattgagtcacgtccgactaaaaccggattaggccattatttctttattattgatattgagaaagcgtttgatgatgtattgattccaggggccatgcaggagcttgaagcactcggctgcaaagtgaggcttctgggtgcataccagtcttaccaattataa

SEQ ID NO: 3617 - DNA, 1318 bp, Bacillus subtilis; identical to SEQ ID NO: 3616

SEQ ID NO: 3618 - DNA, 1318 bp, Bacillus subtilis; identical to SEQ ID NO: 3616

SEQ ID NO: 3619 - DNA, 4067 bp, Mus musculus
ccctgctggaggcctgggcctcgggtggagcagttactgcctgtggatcctctatcacgtcctctgtgtgcagcacacctaggtgcttggctggtacaagatgctgaagttccaaacagttcgagggggcctgaggctcctgggtgtccgccgatcctcctcggcccctgttgcctccccaaatgtccggcgtctggagtataagcctatcaagaaagtaatggtggccaacagaggtgagattgccatccgagtgtttcgtgcgtgcacagagctgggtatccgcacagtggctgtctactcggagcaggacacagggcagatgcacaggcagaaagctgatgaagcctaccttattggccgtggcctggcacctgtgcaggcctacctgcacattccagacatcatcaaggtggccaaggaaaatggtgtagatgcggtgcatcctggctatgggttcctctcagagcgagcagactttgcccaggcctgccaagatgctggagtccggttcattggtccaagcccagaggtggtccgcaagatgggagacaaggtggaagcccgggccattgccatcgctgcaggcgttccagtggtccccggcacggactcccccatcagctccctgcacgaggcgcatgagttctccaacaccttcggcttccctattatcttcaaggccgcctacggaggtgggggccgcggcatgcgggtcgtgcatagctatgaggagttggaagagaattacacccgggcctactccgaggccttggcagcctttgggaatggagcgttgtttgtggagaagttcattgagaagccaaggcacattgaggtgcagatcctaggggaccagtatgggaacatcctgcacctgtacgagcgagactgctccatccagcgtcggcaccagaaggtggtagagatcgcccctgctacccacctggatccccaacttcgctcacgtctcaccagtgactctgtcaaacttgccaagcaggtaggctatgagaacgccggcactgtggagttcctggtggacaagcacggcaagcactacttcatcgaggtcaattcccgcctgcaggtggagcacacggtcaccgaggagatcacagatgtggacctggtccatgctcagatccacgtgtccgaaggccggagcctgcctgacctgggcctgcggcaggagaacatccgcatcaatggctgtgccattcagtgtcgggtcaccaccgaggaccctgcacgcagcttccagccagacaccggccgcattgaggttttccggagtggtgagggcatgggcatccgcctggacaacgcctctgcattccagggcgctgtcatatcgccccactatgactctctgctcgtcaaggtcattgcacacggcaaagaccaccccacagctgccaccaagatgagcagagccctggccgagttccgtgtccgaggtgtaaagaccaacatccccttcctgcagaatgttctcaacaaccagcagttcctggcaggcacagtggacacccagttcatcgatgagaaccctgagctgttccagcttcggcctgcacagaaccgggcccagaagttgctacattacctcggacatgtcatggtgaatggccctaccactccaatccctgtcaatgtgagccccagtcctgtggatcctgctgttcctgtggtgcccataggcccacctccagctggtttcagggacatccttctgcgagaagggccagagggctttgcccgagctgtgcggaatcaccaggggctgctgttgatggacacaaccttccgggatgcccaccagtcactgctggccactagagtgcgcacacatgatctcaaaaagattgcgccctatgttgcccacaacttcaacaagctcttcagcatggagaactggggaggcgccacgttcgacgttgccatgcgcttcctgtacgagtgcccctggcggcggctccaggagctccgggagcttatcccgaacatcccgttccagatgctactgaggggggccaatgctgtgggctacaccaactaccctgacaacgtggtcttcaagttctgtgaggtggccaaagagaatggtatggacgtcttccgagtctttgactccctcaactacttgccaaacatgctgctgggcatggaagcagcaggcagtgctgggggtgtggtggaggctgccatctcatacacgggggacgtggctgaccctagtcgcactaaatactcactggagtactacatgggcttagctgaagaactggtgcgagctggcactcacatcctgtgcattaaggacatggcgggcctgctgaagcctgccgcctgcaccatgctggtcagctccctccgggaccgattccccgacctcccactgcacatccatacccatgatacatcaggggcaggtgtggcagccatgctggcctgtgcacaagcaggggctgatgttgtggacgtggcagtagactccatgtctgggatgacctcacagccaagcatgggggccctggtggcctgtaccaaagggactcctttggacacagaggtacccctggagcgtgtgtttgactacagtgagtactgggaaggggctcggggactgtacgcagccttcgattgcacggctaccatgaagtctggcaactccgacgtgtatgagaatgagattccagggggccagtacaccaacctgcacttccaggcccatagcatggggcttggctccaagttcaaggaggtcaagaaggcctatgtggaggctaaccagatgctgggggacctcatcaaggtgacaccatcctccaagattgtgggggacctggcccagttcatggtgcagaatgggttgagccgggcagaggcagaagctcaggcagaagagctgtccttcccccgctctgtggtggagttcctgcagggctacattggcattccccatgggggtttccctgagccctttcgctctaaggtgctaaaggacctgccaagaatagaggggcggcctggagcctccctccctcccctgaacctgaaggagctggagaaggacctgattgataggcatggggaggaggtgaccccagaggacgtcctctctgcagccatgtaccctgatgtctttgctcaattcaaagacttcacggctaccttcggccccctggatagccttaatactcgtctctttcttcaaggacccaaaattgcagaggagtttgaggttgagctggaacggggcaagaccctgcacatcaaagccctggctgtaagcgacctgaaccgtgctggccagaggcaggtgttctttgaactcaatgggcagcttcgatccattctggttaaagacacccaggccatgaaggagatgcacttccatcccaaggctttgaaggatgtgaagggccaaattggggccccgatgcctgggaaggtcatagacatcaaggtggcagcaggggacaaggtggctaagggccagcccctctgtgtgctcagcgccatgaagatggagactgtggtgacttcgcccatggagggcactatccgaaaggttcatgttaccaaggacatgactctggaaggcgacgacctcatcctagagattgagtgatcttactccagcctggcagcctggccgaccctaccccaagcctctcaacagaagctgtgcagccagggcaggcccaggccagccagtacctgagagtaggaaggccaggcccttgaggtcctgtcccatgggacagcacacacactacctgcaatggcctgcccattcccttcagctatttgtccttttcttactggcaggtagttgctcacatattcatctcttgccaaataagggcctgctcctcgtgggagaccacaggtgtacagtcggtggccttgtacctgggggaggtggcttagggcttctacctctgggggtagagggaagacctaattcacaggtcctgggaaatttgctcaataaaagtggccttcccttgccctccacactaggtcatgtacagtctaaaaaaaaaaaaaaaaaaaaa

SEQ ID NO: 3620 - DNA, 3945 bp, Rattus norvegicus
cgcggcggccacggcttgaggcgacggggcgaagatgctgaagttccaaacagttcgagggggcctgaggctcctgggtgtccgccgatcctccacagcccccgttgcctccccaaatgtccggcgtctggagtacaagcccatcaagaaagtaatggtggccaacagaggtgagattgccatccgagtgtttcgtgcctgcacagagctgggtatccgcacagtggctgtctactcggagcaggacacaggccagatgcaccggcagaaagctgatgaagcctaccttattggccgtgggctggctcctgtgcaagcctacctgcacattccagacatcattaaggtggccaaggagaatggtgtagatgctgtgcaccctggctatgggttcctctcagagagagcagactttgcccaggcctgccaagatgctggagtccgattcattggtccaagcccagaggtggtccgcaagatgggagacaaggtggaagcccgggccattgccattgctgcaggcgttccagtggtccctggcactaattcccccatcaattccctgcatgaggcacacgagttctctaacacctatggtttccctattatcttcaaggctgcctatggaggtgggggccgtggcatgagggttgtgcatagctacgaggagctggaagagaattacacccgggcctaccctgaggccttggcagcctttgggaatggggcattgtttgtggagaaattcattgagaagccaagacacattgaggtgcagatcctaggggaccaatatgggaacatcttgcacttgtatgagcgggactgctccatccagcggcggcaccagaaggtggtagagattgcccctgctacccacctggacccccaacttcggtcacgcctcaccagtgactctgtcaaacttgccaagcaggttggctatgagaatgcaggcactgtggagttcctggtggacaagcatggcaagcactacttcatcgaggtcaattcccgcctgcaggtggagcacacggtcactgaggagattacagatgtggacctggtccatgctcagatccatgtgtccgaaggccggagcctgcctgacctaggcctgcggcaggaaaacatccgaatcaatggttgtgccattcagtgtcgggtcaccactgaggaccctgcacgcagcttccagccagacactggccgcattgaggttttccggagtggtgagggcatgggcatccgcctggacaatgcctcagcattccagggagctgtcatatccccccactatgactccctgctcgtcaaagtcattgcccatggcaaagaccaccctacagctgccaccaagatgagcagagccctggcggagttccgtgtccgaggtgtaaagaccaacatccccttcctgcagaatgtgctcaacaaccagcagttcctagcgggcattgtggacacccagttcatcgatgagaaccccgagctgttccagctgcggcctgcacagaaccgggcccagaagttgctacattaccttggacacgtcatggtcaatggccctaccactccaatccccgtcaaggtcagtcccagccctgtggaccccattgttcctgtggtgcccataggcccacccccagctggtttcagagacatccttctgcgagaggggccagagggctttgccagagctgtgcggaatcaccaggggctgctgctaatggacacaaccttccgggatgcccaccagtcactacttgccactagagtgcgcacacacgatctcaaaaagattgcaccctacgttgcccacaacttcaacaacctcttcagcatagagaactggggaggagccacatttgacgtggccatgcgcttcttgtatgagtgcccctggcggcggctccaggagctccgggagctcatccccaacatcccattccagatgctactgaggggggccaatgctgtgggctacaccaactaccctgacaacgtggtcttcaagttctgtgaggtggccaaagagaatggcatggacgtcttccggatctttgactcccttaactacctgccaaacatgctgctgggcatggaagcagctggcagtgctgggggtgtggtggaagctgccatctcctacacgggtgacgtggctgaccccagtcgcactaaatactcactggagtactacatgggcttagctgaagaactggtgcgagccggcactcacatcctctgcattaaggacatggcaggcctgctgaagcctgcagcatgcaccatgctggtcagctccctccgggaccggttccccgacctcccactgcacatccatacccatgacacatcagggtcaggtgtggcagccatgttggcctgtgcacaagctggggctgatgttgtggatgtggcagtcgactctatgtctgggatgacctcacagcccagcatgggggccctggtggcctgtaccaaagggactcctctggacacagaggtacccctggagcgtgtgtttgactacagtgagtattgggaaggggctcgggggctgtatgcagcctttgattgcacggctaccatgaagtctggcaactcagacgtgtatgagaatgaggatccagggggccagtacaccaacctacacttccaggcccacagcatgggacttggctccaagttcaaggaggtcaagaaggcctatgtggaggctaaccagatgctgggggacctcatcaaggtgacaccatcctccaagattgtgggggatctggcccagttcatggtgcagaacgggttgagccgggcagaggcagaagctcaggcagaagagctgtccttcccccgctctgtggtggagttcctgcagggctacattggcattccccatgggggtttccctgaacccttccgttctaaggtgctaaaggacctgccaaggatagaaggagggcctggagcctccctccctcccttgaacctgaaggagctggagaaggacctgattgataggcatggagaggaggtgaccccagaggacgttctctctgcagccatgtaccctgatgtctttgctcagttcaaagacttcacggctacctttggccccctggatagcctgaatactcgtctctttcttcaaggacccaaaattgcagaggagtttgaggttgagctggaacggggcaagaccttgcacatcaaagccctggctgtaagcgacctgaaccgtgctggccagaggcaggtgttctttgaactcaatgggcagcttcgatccattctggttaaagacacccaggccatgaaggagatgcacttccatcccaaggccttgaaggatgtgaagggccaaattggggcccctatgcctgggaaggtcatagacgtcaaggtggcagcaggagccaaggtggttaagggccagcccctctgtgtgctcagcgccatgaagatggagactgtggtgacttcgcccatggagggcactatccgaaaggttcacgtgaccaaggacatgactctggaaggcgatgacctcatcctagagattgagtgatcttactccagactggcagcctggccaaccctaccccaagcctctcaacagaagctgtgcagccagggcaggcccaggcagtacctgagggctaggccttgaggtcctgtcccatgggacagcacacacactacctgcaatggccctcccattcccttcagctatttgtccttgtcttgctggcaggcagttctcacatattcatctcttgccaaataagggtctgctcctcgtgggagaccacaggtgtacagtaggtggccttgtacctgggagaggggttctacctctgggggtagagggaagaagacctaattcataggtcctgggaaatttgctcaataaaagtggccttcccttgccctccacaaaaa

SEQ ID NO: 3621 - DNA, 4067 bp, Mus musculus; identical to SEQ ID NO: 3619

SEQ ID NO: 3622 - DNA, 3945 bp, Rattus norvegicus; identical to SEQ ID NO: 3620

SEQ ID NO: 3623 - DNA, 4067 bp, Mus musculus; identical to SEQ ID NO: 3619

SEQ ID NO: 3624 - DNA, 3945 bp, Rattus norvegicus; identical to SEQ ID NO: 3620

SEQ ID NO: 3625 - DNA, 600 bp, Cricetulus griseus
tcgacccacgcgtccgctggggctgatgttgtggatgtggcagtaaactccatgtctgggatgacttcacagcccacatgggtgccctggtggcttgtaccaaagggactcctctgaacacagaggtgcccctggagcgtgtgtttgactacagtgaatactgggaaggggctcggggcctgtatgcggcctttgactgcacggctaccatgaagtctggcaactcaaatgtgtatgaaaatgaaatcccagggggccagtacaccaacctacacttccaggcccacagcatggggcttggctccaagttcaaggaggtcaaaaaggcctatgtggaggctaaccaaatgctgggggacctcatcaaggtgacaccatcctccaagattgtgggggacctggcccagttcatggtgcaaaatgggttaagccgagcagaggctgaagctcaggcaaaagagctgtccttccctcgctctgtggtggaattcctgcagggctacattggaattccccatggaggcttccctgagcccttccgctctaaggtgctaaaggacctgccaagattagaggggaggcctggagcctcccttcctc

SEQ ID NO: 3626 - DNA, 4067 bp, Mus musculus; identical to SEQ ID NO: 3619

SEQ ID NO: 3627 - DNA, 3945 bp, Rattus norvegicus; identical to SEQ ID NO: 3620

SEQ ID NO: 3628 - DNA, 1982 bp, Bacillus subtilis
atgtggaaaggacttatccatcaatataaagaatttttacctgtaacagatcaaacaccggcgctaactttacatgaaggaaacacacctcttattcacctgccgaagctgtctgagcagctcggaattgagcttcatgtcaaaacggaaggcgtcaatcctacgggatcatttaaagatcgcggaatggttatggctgtggcaaaggcaaaagaagaaggcaatgacacgattatgtgcgcgtcaacaggtaacacttccgctgctgcggcagcatatgcagcccgtgctaacatgaaatgcattgtcatcatcccgaacggaaaaattgcatttggaaaactcgctcaagctgtcatgtacggagccgagattatcgcaattgacggaaactttgacgatgcgcttaaaattgtccgttccatctgtgagaaatcaccgattgcccttgtcaactcagtcaacccttaccgcattgaaggccaaaaaactgctgccttcgaagtgtgcgaacagctgggggaagcgcctgatgttttagcgatcccggtcggaaatgctggaaacatcactgcgtactggaagggcttcaaggaatatcatgagaaaaacggcacaggccttccgaaaatgcgcggctttgaagctgagggtgcggcggcaatcgtgcgcaatgaagtgattgaaaatccggaaacaatagcgacagccattcgtatcggaaacccggcaagctgggacaaagctgtaaaggcagccgaggaatccaatgggaaaattgacgaagtcactgatgatgaaatccttcacgcatatcagctgatcgcccgtgtagaaggcgtgtttgcagaaccaggttcttgcgcgtctatcgcaggagtgctgaaacaggtgaaatccggagaaattccgaaaggcagcaaggtcgtagctgtgttaacaggaaacggactgaaagatccgaacacagcggtcgacatttcagaaatcaagcctgtcacattgccgactgatgaagacagcatccttgaatatgtaaaaggagcggcccgtgtatgaacgaagccgacatgctgttctctgtcactgttcccggaagcacagctaacctaggccccggctttgattcagtcggaatggcgctcagcagatatttgaagctgaccgtctttgaaagcgacaaatggtcttttgaggctgaaacagaaacagtcgccggaattcgcggtacagataacctgatctaccaagtggctaaacggaccgcagatttgtacggaaaagaaatgcctcctgtccatgtgaaggtgtggagcgacatcccgcttgcacgcggccttggcagcagcgccgcagcgattgtagcggccattgaactggctgatgaattatgcggcttaaagctgtctgaagcggacaagctgcatttagcgagtctagaagaaggacacccggacaatgctggcgcttctctcgtcggcggacttgtgatcggcctgcatgaggatgacgagacccaaatgatccgcgtcccgaatgctgacattgacgtagtcgttgtcattcctttttatgaagtgctgacaagagacgcgagagacgtgcttccgaaggagtttccatatgccgatgccgtaaaagcaagtgctgtcagcaatatcctcattgctgcgatcatgtccaaggattggccgcttgtcgggaaaatcatgaagaaggatatgttccatcagccgtaccgggcgatgcttgtgcctgagctgtcaaaagtagagcacgtcgccgagatgaagggcgcatatggaacggctctcagcggagcaggcccaacgattctcgtcatgaccgaaaaaggaaagggagaagagctaaaagaacagctcgcgcttcatttccctcattgtgaagtagacgctttgaccgttccgaaagagggaagtataatagagcgaaatcctttatatcaagtaaaaagtgtatag

SEQ ID NO: 3629 - DNA, 1982 bp, Bacillus subtilis; identical to SEQ ID NO: 3628

SEQ ID NO: 3630 - DNA, 1982 bp, Bacillus subtilis; identical to SEQ ID NO: 3628

SEQ ID NO: 3631 - DNA, 2460 bp, Cricetulus griseus; identical to SEQ ID NO: 941

SEQ ID NO: 3632 - DNA, 2292 bp, Mus musculus
atgatggatcaagccagatcagcattctctaacttgtttggtggggaaccattgtcatacacccggtttagccttgctcggcaagtagatggagataacagtcatgtggagatgaaactggctgcagatgaagaagaaaatgccgacaataacatgaaggctagtgtcagaaaacccaagaggtttaatggaagactctgctttgcagctattgcactagtcattttcttcttgattggattcatgagtggctacctgggctattgtaagcgtgtagaacaaaaagaggagtgtgtgaaactggctgaaacggaggagacagacaagtcagaaaccatggaaacagaggatgttcctacatcatctcgcttatattgggcagacctcaaaacactgttgtcagagaagttgaactccatagagtttgctgacaccatcaagcagctgagccagaatacatacactcctcgtgaggctggatctcaaaaagatgaaagtcttgcctattatattgaaaatcagttccatgaatttaaattcagcaaagtctggcgagatgaacactatgtgaagattcaagtgaaaagcagcattggtcaaaacatggtgaccatagtgcagtcaaatggtaacttagacccagtggagtctcccgagggttatgtggcattcagtaaacctacagaagtttctggtaaactggtccatgctaattttggcactaaaaaggactttgaagaactaagttattctgtgaatggatctttagtgattgttagagcaggggaaattacttttgcagaaaaggttgcaaatgcccaaagctttaatgcaattggtgtcctcatatacatggacaagaataaattccccgttgttgaggcagaccttgcactctttggacatgctcatctaggaactggtgatccatacacacctggctttccttctttcaatcatactcagtttccgccatctcagtcatcagggttgcctaatatacctgtgcaaacaatctcaagagctgctgcagaaaagctatttggaaaaatggaaggaagctgtcctgctagatggaacatagattcttcatgtaagctggaactttcacagaatcaaaatgtgaagctcattgtgaaaaacgtactgaaagaaagaagaatacttaacatctttggagttattaaaggttatgaggaaccagaccgttatgttgtagtaggagcccagagagacgctttgggtgctggtgttgcggcgaagtccagtgtgggaacaggtcttctgttgaaacttgcccaagtattctcagatatgatttcaaaagatggatttagacccagcagaagtataatctttgccagctggactgcaggcgactttggagctgttggtgccactgagtggttggagggatacctttcatctttgcatttaaaagctttcacttatattaatttggataaagttgtccttggtactagtaacttcaaagtttctgccagccccttattatatacacttatgggaaagataatgcaagatgtaaagcatccagttgatggaaaatctctatatagagacagcaattggattagcaaagttgagaaactttcctttgacaatgctgcatatcctttccttgcatattctggaatcccagcagtttctttttgtttttgtgaggatgcagactatccttatttgggcactagattggatacctatgaggcattgactcagaaagttcctcagctcaaccaaatggttcgtacagcagcggaagtggctggtcagctcattattaaacttacccatgacgttgaattgaacctggactatgagatgtataacagcaaactactgtcatttatgaaggatctgaaccagttcaaaacagatatcagggatatgggtctaagtctacagtggctgtattccgctcgtggagactacttccgtgctacttctagactaacaactgattttcataatgctgagaaaacaaacagatttgtcatgagggaaatcaatgatcgtattatgaaagtggagtatcacttcctgtcgccctatgtatctccaagagagtctcctttccgacatatcttctggggctctggctctcacactctctcagctttagtggagaacttgaagcttcgtcaaaaaaatattactgcttttaatgaaaccctcttcagaaaccagttggccctggctacttggactattcagggagtcgcaaatgccctctctggtgacatttggaatattgacaatgagttttaa

SEQ ID NO: 3633 - DNA, 3413 bp, Rattus norvegicus
catagagttcactgacatcatcaagcagctgagccagaatacatatactcctcgtgaggctggatctcagaaagacgagaatcttgcctattatattgaaaatctgttccatgactttaaattcagcaaagtctggcgagatgaacattatgtgaagattcaagtgaaaaacagtgtttctcaaaacttggtgaccataaattcaggtagtaacattgacccagtggaggctcctgagggttatgtggcatttagtaaagctggagaagttactggtaaactggtccatgctaattttggcactaaaaaggactttgaagaattaaattattctgtgaatggatctttagtgattgttagagcagggaaaattacttttgcagaaaaggttgcaaatgcccaaagctttaatgcaattggtgtcctcatctacatggacaggaatacgttccccgttgttgaggcagaccttcaattctttggacatgctcatctaggaactggggatccatatacacctggctttccttctttcaaccatactcagtttccgccatctcagtcatctggattgccttctatacctgtgcagacgatctcaagagctcctgcagaaaagctattcaaaaacatggaaggaaactgtcctcctagttggaatatagattcctcatgtaagctggaactttcacagaatcaaaatgtgaagctcactgtgaacaatgtactgaaagaaacaagaatacttaacatctttggcgttattaaaggctatgaggaaccagaccgctacattgtagtaggagcccagagagacgcttggggccctggtgttgcgaagtccagtgtgggaacaggtcttctgttgaaacttgcccaagtattctcagatatgatttcaaaagatggatttagacccagcaggagtattatctttgccagctggactgcaggagactatggagctgttggtccgactgagtggctggaggggtacctttcatctttgcatctaaaggctttcacttacattaatctggataaagtcgtcctgggtactagcaacttcaaggtttctgccagccccctattatatacacttatggggaagataatgcaggacgtaaagcatccgattgatggaaaatatctatatcgaaacagtaattggattagcaaaattgaggaactttccttggacaatgctgcattcccttttcttgcatattcaggaatcccagcagtttctttctgtttttgtgaggatgaggactatccttatttgggcactaaactagatacctatgagatattaattcagaaagttcctcagctcaaccaaatggttcgtacagcagcagaggtggccggtcagttcattattaaacttacccatgacattgagttgaccctggactatgagatgtacaacagcaaactactgtcatttatgaaggatctgaaccagttcaaagcagatataaaagatatgggtctaagtctacaatggctgtattctgctcgtggagactacttccgtgctacttctagactaacaactgattttcataatgctgagaaaacaaacagattcgtcatgagggaaatcaatgatcgtattatgaaagtggagtatcacttcctgtcaccctatgtatctccaagagagtctcctttccgacacatcttctggggctctggctctcacaccctctcagctttagtggagaacctgagacttcgtcagaaaaatatcactgctttcaatgaaacgctcttcagaaaccagttggccctggctacgtggactattcagggagttgcaaatgccctctctggtgacatttggaatattgacaatgagttttaaatgtaatgtgcataattaagtgagagagggtagtctgtttctagacttgagctggttgtgctaaattttcattagagctcgaattaatgttaaaaattctacccaatcatctaatgtgtttaggcagcagcttttagtgcagggttggacccacacttcaagttacagtggacaacactttccatgttcatgataccttcttagattatctttagaattttgagtcttttgtaataccttgctctttgcttcatggtcatgaaaatgtcagaaccagttgtaagaacattgctataagtcctgagggcactactagtatcttgaggtgggaggaagagggtgtatgtgaggggcagagtggtcgctgggtgtgattccccatctccatctgaccctcactgggattctccaattgagctgtatgcctgaaggatttagctggcttccattcccctaaagtagacagttacttttcagaagaggtgcaacttgttttcttgccagcaaggttgaactaggtccttctgctggataaaagaaaggaagtttgtctgtttacaggaataaggccttattggtttaacctttgtgttatttaggatgagaccagaagccaaagacttcaagttttctctccactgtcatctacccagtagtctttagttctttgggttgttttgtttttgttttgtttttcttttccaacactttctgaaaaagaacaggtttagactcagtctgtcagcagaacacactgccgagctcggtacccggggatcctctagagtcgacctgcaggcatgcaagctttccctatagtgagtcgtattagagcttggtgcatgcctgcaggtcgactctagaggatccccgggtaccgagctctggccaaagtgctggtcttcagggaagctctgtcgtttttggcactgagatatttattgtttatttatcagtgacagagttcactataaatagtgtttttttaatagaagataattatcggaagcagtgccttccataattatgacagttatactgtcgttttcttttaataaaagcagcatctgctaatgagacccacagatactggaagttttgcacttacggtcagcacttgcgggctttagaaaggagaaagccacaagccaaacaatatccgatgagctagaagaggattgggttaaataagagattcctagttgagttggaaaaaaatgataattctaagtccagtgagttgtggccaagttaaatgtcatttaaaggctatgatagtacatcaacaaaattctatagctcagtttattcaagatgtaactcaaatccaattttgcaaaatttccagtacctttgtcacaaacttaactcacattatcgggagcagtgtcttccataatgtataaagaacaaggtagtttttgcctaccacagtgtctatatcggagacagtgacctccatatgttacactaagggtgtacgtaattatcgggaacagtgtttcccataattttcttcatgcgatgacatcttcaaagcttg

SEQ ID NO: 3634 - DNA, 2460 bp, Cricetulus griseus; identical to SEQ ID NO: 941

SEQ ID NO: 3635 - DNA, 2292 bp, Mus musculus; identical to SEQ ID NO: 3632

SEQ ID NO: 3636 - DNA, 3413 bp, Rattus norvegicus; identical to SEQ ID NO: 3633

SEQ ID NO: 3637 - DNA, 2460 bp, Cricetulus griseus; identical to SEQ ID NO: 941

SEQ ID NO: 3638 - DNA, 2292 bp, Mus musculus; identical to SEQ ID NO: 3632

SEQ ID NO: 3639 - DNA, 3413 bp, Rattus norvegicus; identical to SEQ ID NO: 3633

SEQ ID NO: 3640 - DNA, 2525 bp, Bacillus subtilis
ctcgagccaacaccgagagagacatacggcgggtgtattgcctacattgggtttgacgggaatatcgactcttgtattacgattcgcacgatgagtgtaaagaacggtgttgcatcgatacaggcaggtgctggcattgttgctgattctgttccggaagccgaatacgaagaaagctgtaataaagccggtgcgctgctgaaaacgattcatattgcagaagacatgtttcatagcaaggaggataaagctgatgaacagatttctacaattgtgcgttgacggaaaaacccttactgccggtgaggctgaaacgctgatgaatatgatgatggcagcggaaatgactccttctgaaatgggggggatattgtcaattcttgctcatcggggggagacgccagaagagcttgcgggttttgtgaaggcaatgcgggcacacgctcttacagtcgatggacttcctgatattgttgatacatgcggaacagggggagacggtatttccacttttaatatctcaacggcctcggcaattgttgcctcggcagctggtgcgaaaatcgctaagcatggcaatcgctctgtctcttctaaaagcggaagcgctgatgttttagaggagctagaggtttctattcaaaccactcccgaaaaggtcaaaagcagcattgaaacaaacaacatgggatttctttttgcgccgctttaccattcgtctatgaaacatgtagcaggtactagaaaagagctaggtttcagaacggtatttaatctgcttgggccgctcagcaatcctttacaggcgaagcgtcaggtgattggggtctattctgttgaaaaagctggactgatggcaagcgcactggagacgtttcagccgaagcacgtcatgtttgtatcaagccgtgacggtttagatgagctttcaattacagcaccgaccgacgtgattgaattaaaggacggagagcgccgggaatataccgtttcacccgaagatttcggtttcacaaatggcagacttgaagatttacaggtgcagtcaccgaaagagagcgcctatctcattcagaatatttttgaaaataaaagcagcagttccgctttatctattacggcttttaatgcgggagctgcgatttacacggcgggaattaccgcctcactgaaggaaggaacggagctggcgttagagacgattacaagcggaggcgctgccgcgcagcttgaacgactaaagcagaaagaggaagagatctatgcttgaaaaaatcatcaaacaaaagaaagaagaagtgaaaacactggttttgccggtagagcagcctttcgagaaacgttcatttaaggaggcgctggcaagcccgaatcggtttatcgggttgattgccgaagtgaagaaagcatcgccgtcaaaagggcttattaaagaggattttgtgcctgtgcagattgcaatagactatgaggctgcgaaggcagatgcgatttccgttttaacagacaccccgttttttcaaggggaaaacagttatttatcagacgtaaagcgtgctgtttcgattcctgtacttagaaaagattttattcttgattctcttcaagtagaggaatcaagaagaatcggagcggatgccatattgttaatcggcgaggtgcttgatcccttacaccttcatgaattatatcttgaagcaggtgaaaaggggatggacgtgttagtggaggttcatgatgcatcaacgctagaacaaatattgaaagtgttcacacccgacattctcggcgtaaataatcgaaacctaaaaacgtttgaaacatctgtaaagcagacagaacaaatcgcatctctcgttccgaaagaatccttgcttgtcagcgaaagcggaatcggttctttagaacatttaacatttgtcaatgaacatggggcgcgagctgtacttatcggtgaatcattgatgagacaaacttctcagcgtaaagcaatccatgctttgtttagggagtgaggttgtgaagaaaccggcattaaaatattgcggtattcggtcactaaaggatttgcagcttgcggcggaatcacaggctgattacctaggatttatttttgctaaaagcaaacgaaaagtatctccggaagatgtgaaaaaatggctgaaccaagttcgtgtcgaaaaacaggttgcaggtgtttttgttaatgaatcaatagagacgatgtcacgtattgccaagagcttgaagctcgacgtcattcagcttcacggtgatgaaaaaccggcggatgctgctgctcttcgcaagctgacaggctgtgaaatatggaaggcgcttcaccatcaagataacacaactcaagaaatagcccgctttaaagataatgttgacggctttgtgattgattcatctgtaaaagggtctagaggcggaactggtgttgcattttcttgggaatgtgtgccggaatatcagcaggcggctattggtaaacgctgttttatcgcaggcggcgtggatcc

SEQ ID NO: 3641 - DNA, 2525 bp, Bacillus subtilis; identical to SEQ ID NO: 3640

SEQ ID NO: 3642 - DNA, 2525 bp, Bacillus subtilis; identical to SEQ ID NO: 3640

SEQ ID NO: 3643 - DNA, 856 bp, Unknown; identical to SEQ ID NO: 1
  neomycin phosphotransferase II

SEQ ID NO: 3644 - DNA, 554 bp, Unknown; identical to SEQ ID NO: 2
  internal ribosomal entry site (IRES)

SEQ ID NO: 3645 - DNA, 1216 bp, Homo sapiens; identical to SEQ ID NO: 3

SEQ ID NO: 3646 - DNA, 564 bp, Cricetulus griseus; identical to SEQ ID NO: 4

SEQ ID NO: 3647 - DNA, 1287 bp, Homo sapiens; identical to SEQ ID NO: 5

SEQ ID NO: 3648 - DNA, 1029 bp, Homo sapiens; identical to SEQ ID NO: 6

SEQ ID NO: 3649 - DNA, 746 bp, Homo sapiens; identical to SEQ ID NO: 7

SEQ ID NO: 3650 - DNA, 1400 bp, Homo sapiens
ttgggctgagctggctttttcttgtggctattttaaaaggtgtccagtgtgaggtgcagctgctggagtccggcggcggcctggtgcagcccggcggctccctgcgcctgtcctgcgccgcctccggcttcaccttctccaactacggcatgtcctgggtgcgccaggcccccggcaagggcctggagtgggtggcctccatccgctccggcggcggccgcacctactactccgacaacgtgaagggccgcttcaccatctcccgcgacaactccaagaacaccctgtacctgcagatgaactccctgcgcgccgaggacaccgccgtgtactactgcgtgcgctacgaccactactccggctcctccgactactggggccagggcaccctggtgaccgtgtcctccgcctccaccaagggcccatcggtcttccccctggcaccctcctccaagagcacctctgggggcacagcggccctgggctgcctggtcaaggactacttccccgaaccggtgacggtgtcgtggaactcaggcgccctgaccagcggcgtccacaccttcccggctgtcctacagtcctcaggactctactccctcagcagcgtagtgaccgtgccctccagcagcttgggcacccagacctacatctgcaacgtgaatcacaagcccagcaacaccaaggtggacaagaaagttgagcccaaatcttgtgacaaaactcacacatgcccaccgtgcccagcacctgaactcctggggggaccgtcagtcttcctcttccccccaaaacccaaggacaccctcatgatctcccggacccctgaggtcacatgcgtggtggtggacgtgagccacgaagaccctgaggtcaagttcaactggtacgtggacggcgtggaggtgcataatgccaagacaaagccgcgggaggagcagtacaacagcacgtaccgtgtggtcagcgtcctcaccgtcctgcaccaggactggctgaatggcaaggagtacaagtgcaaggtctccaacaaagccctcccagcccccatcgagaaaaccatctccaaagccaaagggcagccccgagaaccacaggtgtacaccctgcccccatcccgggaggagatgaccaagaaccaggtcagcctgacctgcctggtcaaaggcttctatcccagcgacatcgccgtggagtgggagagcaatgggcagccggagaacaactacaagaccacgcctcccgtgctggactccgacggctccttcttcctctatagcaagctcaccgtggacaagagcaggtggcagcaggggaacgtcttctcatgctccgtgatgcatgaggctctgcacaaccactacacgcagaagagcctctccctgtccccgggtaaatga

SEQ ID NO: 3651 - DNA, 564 bp, Mus musculus; identical to SEQ ID NO: 9

SEQ ID NO: 3652 - DNA, 1400 bp, Homo sapiens
ccgaggggggctgggctccatctttgtctgggcctcggggaacgggggccgggaacatgacagctgcaactgcgacggctacaccaacagtatctacacgctgtccatcagcagcgccacgcagtttggcaacgtgccgtggtacagcgaggcctgctcgtccacactggccacgacctacagcagtggcaaccagaatgagaagcagatcgtgacgactgacttgcggcagaagtgcacggagtctcacacgggcacctcagcctctgcccccttagcagccggcatcattgctctcaccctggaggccaataagaacctcacatggcgggacatgcaacacctggtggtacagacctcgaagccagcccacctcaatgccaacgactgggccaccaatggtgtgggccggaaagtgagccactcatatggctacgggcttttggacgcaggcgccatggtggccctggcccagaattggaccacagtggccccccagcggaagtgcatcatcgacatcctcaccgagcccaaagacatcgggaaacggctcgaggtgcggaagaccgtgaccgcgtgcctgggcgagcccaaccacatcactcggctggagcacgctcaggcgcggctcaccctgtcctataatcgccgtggcgacctggccatccacctggtcagccccatgggcacccgctccaccctgctggcagccaggccacatgactactccgcagatgggtttaatgactgggccttcatgacaactcattcctgggatgaggatccctctggcgagtgggtcctagagattgaaaacaccagcgaagccaacaactatgggacgctgaccaagttcaccctcgtactctatggcaccgcccctgaggggctgcccgtacctccagaaagcagtggctgcaagaccctcacgtccagtcaggcctgtgtggtgtgcgaggaaggcttctccctgcaccagaagagctgtgtccagcactgccctccaggcttcgccccccaagtcctcgatacgcactatagcaccgagaatgacgtggagaccatccgggccagcgtctgcgccccctgccacgcctcatgtgccacatgccaggggccggccctgacagactgcctcagctgccccagccacgcctccttggaccctgtggagcagacttgctcccggcaaagccagagcagccgagagtccccgccacagcagcagccacctcggctgcccccggaggtggaggcggggcaacggctgcgggcagggctgctgccctcacacctgcctgagtgatgagcccactgcccaccccctcaagccaatcccctccttgggcactttttaattcaccaaagtatttttttatctgtcgactctagacccgggg

SEQ ID NO: 3653 - DNA, 942 bp, Homo sapiens; identical to SEQ ID NO: 11

SEQ ID NO: 3654 - DNA, 1400 bp, Homo sapiens
cgaacatcttcctcaaatttggatctggctatgtaagtggctggggaagagtcttccacaaagggagatcagctttagttcttcagtaccttagagttccacttgttgaccgagccacatgtcttcgatctacaaagttcaccatctataacaacatgttctgtgctggcttccatgaaggaggtagagattcatgtcaaggagatagtgggggaccccatgttactgaagtggaagggaccagtttcttaactggaattattagctggggtgaagagtgtgcaatgaaaggcaaatatggaatatataccaaggtatcccggtatgtcaactggattaaggaaaaaacaaagctcacttaatgaaagatggatttccaaggttaattcattggaattgaaaattaacagggcctctcactaactaatcactttcccatcttttgttagatttgaatatatacattctatgatcattgctttttctctttacaggggagaatttcatattttacctgagcaaattgattagaaaatggaaccactagaggaatataatgtgttaggaaattacagtcatttctaagggcccagcccttgacaaaattgtgaagttaaattctccactctgtccatcagatactatggttctccactatggcaactaactcactcaattttccctccttagcagcattccatcttcccgatcttctttgcttctccaaccaaaacatcaatgtttattagttctgtatacagtacaggatctttggtctactctatcacaaggccagtaccacactcatgaagaaagaacacaggagtagctgagaggctaaaactcatcaaaaacactactccttttcctctaccctattcctcaatcttttaccttttccaaatcccaatccccaaatcagtttttctctttcttactccctctctcccttttaccctccatggtcgttaaaggagagatggggagcatcattctgttatacttctgtacacagttatacatgtctatcaaacccagacttgcttccatagtggagacttgcttttcagaacatagggatgaagtaaggtgcctgaaaagtttgggggaaaagtttctttcagagagttaagttattttatatatataatatatatataaaatatataatatacaatataaatatatagtgtgtgtgtgtatgcgtgtgtgtagacacacacgcatacacacatataatggaagcaataagccattctaagagcttgtatggttatggaggtctgactaggcatgatttcacgaaggcaagattggcatatcattgtaactaaaaaagctgacattgacccagacatattgtactctttctaaaaataataataatctagaggcctctg

SEQ ID NO: 3655 - DNA, 1400 bp, Homo sapiens
atgggagacaagtgacagtacaggaatttgctctgtttctcaccatctttgatgagaccaaaagctggtacttcactgaaaatatggaaagaaactgcagggctccctgcaatatccagatggaagatcccacttttaaagagaattatcgcttccatgcaatcaatggctacataatggatacactacctggcttagtaatggctcaggatcaaaggattcgatggtatctgctcagcatgggcagcaatgaaaacatccattctattcatttcagtggacatgtgttcactgtacgaaaaaaagaggagtataaaatggcactgtacaatctctatccaggtgtttttgagacagtggaaatgttaccatccaaagctggaatttggcgggtggaatgccttattggcgagcatctacatgctgggatgagcacactttttctggtgtacagcaataagtgtcagactcccctgggaatggcttctggacacattagagattttcagattacagcttcaggacaatatggacagtgggccccaaagctggccagacttcattattccggatcaatcaatgcctggagcaccaaggagcccttttcttggatcaaggtggatctgttggcaccaatgattattcacggcatcaagacccagggtgcccgtcagaagttctccagcctctacatctctcagtttatcatcatgtatagtcttgatgggaagaagtggcagacttatcgaggaaattccactggaaccttaatggtcttctttggcaatgtggattcatctgggataaaacacaatatttttaaccctccaattattgctcgatacatccgtttgcacccaactcattatagcattcgcagcactcttcgcatggagttgatgggctgtgatttaaatagttgcagcatgccattgggaatggagagtaaagcaatatcagatgcacagattactgcttcatcctactttaccaatatgtttgccacctggtctccttcaaaagctcgacttcacctccaagggaggagtaatgcctggagacctcaggtgaataatccaaaagagtggctgcaagtggacttccagaagacaatgaaagtcacaggagtaactactcagggagtaaaatctctgcttaccagcatgtatgtgaaggagttcctcatctccagcagtcaagatggccatcagtggactctcttttttcagaatggcaaagtaaaggtttttcagggaaatcaagactccttcacacctgtggtgaactctctagacccaccgttactgactcgctaccttcgaattcacccccagagttgggtgcaccagattgccctgaggatggaggttctgggctgcgaggcacaggacctctactga

SEQ ID NO: 3656 - DNA, 1400 bp, Homo sapiens
acacgcttttaccatggcaatgcacaaatggatcagaagttcaaagttcctgggcagaaactacttattggatatcaccacaaggaattccagaaactaaagttcaggatatggattgcgtatattacaattggcaatatttactctgttcttggaaacctggcataggtgtacttcttgataccaattacaacttgttttactggtatgagggcttggatcatgcattacagtgtgttgattacatcaaggctgatggacaaaatataggatgcagatttccctatttggaggcatcagactataaagatttctatatttgtgttaatggatcatcagagaacaagcctatcagatccagttatttcacttttcagcttcaaaatatagttaaacctttgccgccagtctatcttacttttactcgggagagttcatgtgaaattaagctgaaatggagcatacctttgggacctattccagcaaggtgttttgattatgaaattgagatcagagaagatgatactaccttggtgactgctacagttgaaaatgaaacatacaccttgaaaacaacaaatgaaacccgacaattatgctttgtagtaagaagcaaagtgaatatttattgctcagatgacggaatttggagtgagtggagtgataaacaatgctgggaaggtgaagacctatcgaagaaaactcccaaatcttgtgacaaaactcacacatgcccaccgtgcccagcacctgaactcctggggggaccgtcagtcttcctcttccccccaaaacccaaggacaccctcatgatctcccggacccctgaggtcacatgcgtggtggtggacgtgagccacgaagaccctgaggtcaagttcaactggtacgtggacggcgtggaggtgcataatgccaagacaaagccgcgggaggagcagtacaacagcacgtaccgtgtggtcagcgtcctcaccgtcctgcaccaggactggctgaatggcaaggagtacaagtgcaaggtctccaacaaagccctcccagtccccatcgagaaaaccatctccaaagccaaagggcagccccgagaaccacaggtgtacaccctgcccccatcccgggaggagatgaccaagaaccaggtcagcctgacctgcctggtcaaaggcttctatcccagcgacatcgccgtggagtgggagagcaatgggcagccggagaacaactacaagaccacgcctcccgtgctggactccgacggctccttcttcctctatagcaagctcaccgtggacaagagcaggtggcagcaggggaacgtcttctcatgctccgtgatgcatgaggctctgcacaaccactacacgcagaagagcctctccctgtccccgggtaaatga

SEQ ID NO: 3657 - DNA, 1400 bp, Homo sapiens
caaccctgatgccttacactcgcctcactcagctgaacctagataggtgcgagctcaccaagctccaggtcgatgggacgctgccagtgctggggaccctggatctatcccacaatcagctgcaaagcctgcccttgctagggcagacactgcctgctctcaccgtcctggacgtctccttcaaccggctgacctcgctgcctcttggtgccctgcgtggtcttggcgaactccaagagctctacctgaaaggcaatgagctgaagaccctgcccccagggctcctgacgcccacacccaagctggagaagctcagtctggctaacaacaacttgactgagctccccgctgggctcctgaatgggctggagaatctcgacacccttctcctccaagagaactcgctgtatacaataccaaagggcttttttgggtcccacctcctgccttttgcttttctccacgggaacccctggttatgcaactgtgagatcctctattttcgtcgctggctgcaggacaatgctgaaaatgtctacgtatggaagcaagtggtggacgtcaaggccgtgacctctaacgtggccagtgtgcagtgtgacaattcagacaagtttcccgtctacaaatacccaggaaaggggtgccccacccttggtgatgaaggtgacacagacctatatgattactacccagaagaggacactgagggcgataaggtgcggccgcacacatgcccaccgtgcccagcacctgaagccctgggggcaccgtcagtcttcctcttccccccaaaacccaaggacaccctcatgatctcccggacccctgaggtcacatgcgtggtggtggacgtgagccacgaagaccctgaggtcaagttcaactggtacgtggacggcgtggaggtgcataatgccaagacaaagccgcgggaggagcagtacaacagcacgtaccgtgtggtcagcgtcctcaccgtcctgcaccaggactggctgaatggcaaggagtacaagtgcaaggtctccaacaaagccctcccagtccccatcgagaaaaccatctccaaagccaaagggcagccccgagaaccacaggtgtacaccctgcccccatcccgggaggagatgaccaagaaccaggtcagcctgacctgcctggtcaaaggcttctatcccagcgacatcgccgtggagtgggagagcaatgggcagccggagaacaactacaagaccacgcctcccgtgctggactccgacggccccttcttcctctacagcaagctcaccgtggacaagagcaggtggcagcaggggaacgtcttctcatgctccgtgatgcatgaggctctgcacaaccactacacgcagaagagcctctccctgtctccgggtaaa

SEQ ID NO: 3658 - DNA, 1400 bp, Homo sapiens
ccgcccaggtggcatttacaccctacgccccggagcccgggagcacatgccggctcagagaatactatgaccagacagctcagatgtgctgcagcaaatgctcgccgggccaacatgcaaaagtcttctgtaccaagacctcggacaccgtgtgtgactcctgtgaggacagcacatacacccagctctggaactgggttcccgagtgcttgagctgtggctcccgctgtagctctgaccaggtggaaactcaagcctgcactcgggaacagaaccgcatctgcacctgcaggcccggctggtactgcgcgctgagcaagcaggaggggtgccggctgtgcgcgccgctgcgcaagtgccgcccgggcttcggcgtggccagaccaggaactgaaacatcagacgtggtgtgcaagccctgtgccccggggacgttctccaacacgacttcatccacggatatttgcaggccccaccagatctgtaacgtggtggccatccctgggaatgcaagcatggatgcagtctgcacgtccacgtcccccacccggagtatggccccaggggcagtacacttaccccagccagtgtccacacgatcccaacacacgcagccaactccagaacccagcactgctccaagcacctccttcctgctcccaatgggccccagccccccagctgaagggagcactggcgacgagcccaaatcttgtgacaaaactcacacatgcccaccgtgcccagcacctgaactcctggggggaccgtcagtcttcctcttccccccaaaacccaaggacaccctcatgatctcccggacccctgaggtcacatgcgtggtggtggacgtgagccacgaagaccctgaggtcaagttcaactggtacgtggacggcgtggaggtgcataatgccaagacaaagccgcgggaggagcagtacaacagcacgtaccgtgtggtcagcgtcctcaccgtcctgcaccaggactggctgaatggcaaggagtacaagtgcaaggtctccaacaaagccctcccagcccccatcgagaaaaccatctccaaagccaaagggcagccccgagaaccacaggtgtacaccctgcccccatcccgggaggagatgaccaagaaccaggtcagcctgacctgcctggtcaaaggcttctatcccagcgacatcgccgtggagtgggagagcaatgggcagccggagaacaactacaagaccacgcctcccgtgctggactccgacggctccttcttcctctatagcaagctcaccgtggacaagagcaggtggcagcaggggaacgtcttctcatgctccgtgatgcatgaggctctgcacaaccactacacgcagaagagcctctccctgtctccgggtaaatga

SEQ ID NO: 3659 - DNA, 396 bp, Homo sapiens; identical to SEQ ID NO: 17

SEQ ID NO: 3660 - DNA, 1312 bp, Homo sapiens; identical to SEQ ID NO: 18

SEQ ID NO: 3661 - DNA, 579 bp, Cricetulus griseus; identical to SEQ ID NO: 19

SEQ ID NO: 3662 - DNA, 578 bp, Cricetulus griseus; identical to SEQ ID NO: 20

SEQ ID NO: 3663 - DNA, 520 bp, Cricetulus griseus; identical to SEQ ID NO: 21

SEQ ID NO: 3664 - DNA, 581 bp, Cricetulus griseus; identical to SEQ ID NO: 22

SEQ ID NO: 3665 - DNA, 600 bp, Cricetulus griseus
ctgtattgtctgtgtctttgtgtttttgtgccggctgaaatctggttctgtgctttgcagtcgctcgtgtctcgggaagagacaagakctctggtctcgggaggagacagaatgtgatcagtagacgtgcttgggagatcaccgactgccaccctggaagacgttccakgaagtctgtgggaacctcakggacgcttgggagattcccgtctgggagccggtgagggyacrgtagtyctcctggattggggaagttatccgtcctcycggccgtstgtatttctggaatggttttgtctgtctargtggagacagacatctgatagtttttgtctgtgtcttgggtgttgttttgtcttatctgtgactttgatgatgggactgactgtaaccaacccccctcagtctgacttttgaccattggatggacgttaargaccatagttagtcagttaaagttacagcaccctctttcgttgagtcatgtggcgccacactaggtaactttatcttccagtctttgtttctgtatggyttctgtacaagaattgtttarggcagaggttcggatgacagcttctgcagtctgtatgagcggga

SEQ ID NO: 3666 - DNA, 580 bp, Cricetulus griseus; identical to SEQ ID NO: 24

SEQ ID NO: 3667 - DNA, 552 bp, Cricetulus griseus; identical to SEQ ID NO: 25

SEQ ID NO: 3668 - DNA, 582 bp, Cricetulus griseus
  misc_feature (191)..(241): n is a, c, g, or t
  misc_feature (501)..(521): n is a, c, g, or t
gccttgaaagagttacttgtatttgktacatctaatgcttccctatctggttattacaggtcttcaaatacatgccaacgtaggcaagacattgtaatcgaactcctgagttgcccatcatgggcttcgacaatcacactcttgaykgawcctgtttttcctctgcatttcccaactcttgttttattttnnnnnnnnnnnnnnnnnnnnnnnnnnnnnnnnnnnnnnnnnnnnnnnnnnnatgcatttagtcccagcccctgtgaggcagagacaggcaaatctctgtgagtttgagatcagtctcatctacatagtgagttctagggcagccaaggctacaaattgagaccctgtctttaatcatcatcatcatcatcttattcataaatatttcagtattcactctaaaatgtaaagactcattttaaagtatgacaaggtccacatttccctgcctccatcatgatgttcagattttcaattgattcttttttttcnnnnnnnnnnnnnnnnnnnnnaaaacaaaacctttttggggggttttggaacctttgtgtccaaaaggcggggattaaaggc

SEQ ID NO: 3669 - DNA, 600 bp, Cricetulus griseus
tgttctcgagggcttaaatgtcctggtgacaatatctgagaaaaaaggataagttacgtgtctactatttatcctggttaagaaataaaattctacatmatgatccasaagttgagaagaagcaagggtggaccactgtgggcgatttggaargatgtgtacactataaagytgtaaaatatgaaagaataaaatttctggtaattgctttgaagagttctgtggaagtctatgcgtgggcaccgaakccatatcacaaatttatggcctttaagtcctttggagaactggtacataagccattactggtggatctcactgwtgaggaaggccakargttgaaagtgatctatkgatcctgtgctggatwccatgctgttgatgtggattcaggctcagtctatgacatttatctaccaacacacattcagtgtagcatcaaaccccatgcaatcattattctccccaacacggatggaatggagcttctggtgtgctatgaagatgagggggtttatgttaacacctctggaaggatcaccaaggatgtggttctgcactggggagagatgccgacatctgtagcatatatccgatcga

SEQ ID NO: 3670 - DNA, 580 bp, Cricetulus griseus; identical to SEQ ID NO: 28

SEQ ID NO: 3671 - DNA, 584 bp, Cricetulus griseus; identical to SEQ ID NO: 29
  misc_feature (416)..(467): n is a, c, g, or t

SEQ ID NO: 3672 - DNA, 600 bp, Cricetulus griseus
ttagacgtgtgcattgaatataactcatgcacttgcacatacagatagttttgaagtcttgcaatgaccgtgttaagagttcagcagtcttctgtatagggatttagatttataaaacttgctgtatttgttaccacttttgatctgtatgacagtcctgaaaatagatgatagccatctgctcatactctcctgtggttgtaaaaaggctgtttaatttgttgtctcctctcagagaactgaggtttttatagcttagccttttagggggacaatcctaaaagactgtactaaagaattcataaaagtgtgtgtattggggaagataacagtgaaaagaataagatagtggtttacatgaaactagaaagtcttttggggttttagagtaatcctgcaacactagcaacttcactgwggktatgaacacttaaaactagcggcaggcatacaactgcaagaagccattcrattgtcaagatttttatactactactgctgkatatttatactatataccasctatatagtgccccaaatattttctgccattcggacgttagaatcacaatttctaatgcctttattttggatcatgaa

SEQ ID NO: 3673 - DNA, 578 bp, Cricetulus griseus; identical to SEQ ID NO: 31

SEQ ID NO: 3674 - DNA, 579 bp, Cricetulus griseus; identical to SEQ ID NO: 32
  misc_feature (176)..(220): n is a, c, g, or t

SEQ ID NO: 3675 - DNA, 539 bp, Cricetulus griseus; identical to SEQ ID NO: 33
  misc_feature (303)..(319): n is a, c, g, or t

SEQ ID NO: 3676 - DNA, 600 bp, Cricetulus griseus
gaaaccagcagtactccakggacggccacaagatcccaggaggaaaagcccagcaaagtaaaagcacaacctgaaagaacagacgagtgtgaagaaacaattccacaactggtaccaatagaagaaataccaaataaagaaaacatgaagatgcaagaaaatggcacagggaaaaaacctccaaaaaagagacctgatccagatacccttaagggcaagawaaggaakgccctgccagctacagagatcccaggagctttggggcctgtcacctcggggaagaaacaaaaaaaagatgttcgggaaatcagaaagccaggagccaagttctttactcccaggaaagcttccaacacacccaaagacaaaaaaccccaagtggcccactcaaactaaaatcaggttcctctgcctgaaggaactatcaagaatacataggcagggtgtggttgcacacactgtgggacatagataggcagatttgtatgggtttgagtccagcctggttgcctacctggtagtttaggccagccagactagtgagacagacaaacttggccaagattggttgtgcacacctacattcctaacactcaagaa

SEQ ID NO: 3677 - DNA, 599 bp, Cricetulus griseus; identical to SEQ ID NO: 35

SEQ ID NO: 3678 - DNA, 600 bp, Cricetulus griseus
taattaaggggagagatgtcattgcacagtctcagtctggcacaggcaagacggccaccttcagcatttcagtcctccagtgcttggatatccaggttcgagaaacccaagctttgatcttggctccaacaagagagttagctgtacagattcagaagggtctgcttgctctgggggactacatgaatgtccagtgccatgcctgcatcgggggcaccaatgttggagaggacattcggaagctggactatgggcagcatgttgtggcaggcacacyagggcgtgtctttgatatgattcgccgtagaagtttaaggacccgggctatcaagatgttggttttggatgaggctgatgaaatgttgaacaaaggtttcaaggagcagatctacgatgtgtacaggtacctgccacctgccacccaggtggttctcatcagtgccacattgcctcatgagatcctggagatgaccaacaaattcatgactgaccccatccgcatcttggtgaagcgtgatgagttgactctggaaggcatcaagcagttctttgtggcagtggagagagaggagtggaagtttgacactctgtgtgatctct

SEQ ID NO: 3679 - DNA, 580 bp, Cricetulus griseus; identical to SEQ ID NO: 37
  misc_feature (473)..(489): n is a, c, g, or t

SEQ ID NO: 3680 - DNA, 579 bp, Cricetulus griseus; identical to SEQ ID NO: 38
  misc_feature (216)..(248): n is a, c, g, or t

SEQ ID NO: 3681 - DNA, 600 bp, Cricetulus griseus
cccttcaaccagggctatggggagggggccaaggagggtgctgatgaggaagagtgggtcgtggctaaagataagcctgtgtrcgatgaactcttttatacgctatcacccatcaatggcaagatatcaggtgtcaatgccaagaaggaaatggtgacctccaagctgcccaacagtgtcctgggcaagatctggaagctggccgactgtgactgcgacggcatgctggatgaggaggagtttgccctggccaagcacctcatcaagatcaagttggatggctacgagctaccgaacagcctgcccccacaccttgtgcccccctctcacaggaagtccctgccaaaggctgactgawgagggcgcaccgctggggtgggaaaggakggggtccctgggcctgaagtatgctatgccactgacttgctgaatgtccttagccaaggytctgtcctctccatatctcagttccctcatacgtagggtagggaakggcagatactggactctagatgaggtcctcttacctctaaaatccctaagtttctatcaaaatatttctatctaaatattgagaagagcactatatatggagattaa

SEQ ID NO: 3682 - DNA, 581 bp, Cricetulus griseus; identical to SEQ ID NO: 40
  misc_feature (445)..(462): n is a, c, g, or t

SEQ ID NO: 3683 - DNA, 600 bp, Cricetulus griseus
ctgccactgcgaccatggtctccggcagcagcggcctcgtagccgcccgcctgctgtcgcgcaccttcctcctgcagcataatgggatacggcatgcatcttatgacgcttcccggaaacatatctacattgatraaaataccaaggttatttgccakggtttcactggcaagcagggcacctttcacagccagcaggccttggaatatggcacaaaactcgtgggaggaacctcgccagggaagggcggcaagacacacctgggcttgcctgtttttaatactgygaaggaagccaaagagaagacaggagcgacagcttctgtcatttatgtacctcctccttttgctgctgccgccatcactgaagcagttgacgcadagattcccttggttgtgtgcattactgaaggtatcccacagcargatatggttcgggtcaggcacacactttcacaccaargaaakacgaggctaattgggccaaactgccctggaatcatcaatcctggagaatgtaaaattggcatcatgcctggccatattcacaagaaaggaaaaataggtattgtgtccagatctggcacgttgacttatgaag

SEQ ID NO: 3684 - DNA, 362 bp, Cricetulus griseus; identical to SEQ ID NO: 42
  misc_feature (69)..(91): n is a, c, g, or t

SEQ ID NO: 3685 - DNA, 204 bp, Cricetulus griseus
  misc_feature (30)..(30): n is a, c, g, or t
tcgacccacgccgtccgctgctgacctggnaatatcaacaatgtcatcagaatccagcaaaaaacggaaacccaaagtgatccgaagtgatggaaccccaagcgaagggaaacgaaatcgatctgacactgagcaggaaggcaaatactacagtgaggaggctgaggttgacctgcgggaccctggcagagactatgaattgtg

SEQ ID NO: 3686 - DNA, 567 bp, Cricetulus griseus; identical to SEQ ID NO: 44

SEQ ID NO: 3687 - DNA, 551 bp, Cricetulus griseus
gtttgtcctatcccagtgtggtttctttcctttgttttatcttactttattttattattatctttagaagtctgtctgttttctaatgagatgggtgggaaggaccaggagaagtgggagtagtagaagggaaaccttaatcaggatatattgtatgaaaaaaatgcattttcaattcaataacaaaaaagtacagcgaaagaggagtttagaaaaatgcactctacagcctaaatgccttgctttgtaaacaagttgattttggaacataattgtgtccacttgctttaagtgttttatgttgtctgtttctcacctcagtagtagaaggaggtggttatgaaagacaagctataatctacaacataaaataccacctgcattttgagaagtggttacacacgactctcttaaaacgttcatgcctacacttaggtgtgtcttatcctttccctggacacttctcccatggtgcttaaatctatgtaaaatttattccttataaagtctaactctgcttgtgataggaagaggggggatgtttggcatga

SEQ ID NO: 3688 - DNA, 578 bp, Cricetulus griseus; identical to SEQ ID NO: 46
  misc_feature (308)..(340): n is a, c, g, or t

SEQ ID NO: 3689 - DNA, 518 bp, Cricetulus griseus
  misc_feature (191)..(191): n is a, c, g, or t
  misc_feature (439)..(456): n is a, c, g, or t
taaacaaatcaaatcaaattcaagctgggggttcagtttttaagactcaagtgtggagaatgagactaagccaagctctaggtttcttgtaggggtgctatccaggtagggcaagcctaatgattgtcatttggcttgagatagttttcagttgtgtgggtttgtttggtttttgttgttgttcattttanttttactaaataataatatctcagaactttccaagtttctttatggtggtttcttttatcaaatgacttgcaaactacacatgcataagccgaaggatagagattcgaagatgtgctctccgggaagtgtttagatacatctaggataaggggggcgggattatgagctgtgggaaagagtaggcttaaaggttagtgtgacccctttatgtgtgtcagtaaagaagtcagtctgccaccaatggagnnnnnnnnnnnnnnnnnnggtttttttttggtttttcgagacagggtctctctgtttggagcctatcctggcacttgctc

SEQ ID NO: 3690 - DNA, 600 bp, Cricetulus griseus
atagaaccagtctgccatggcaagggctaaaggctgcaacaaagaaacaaaaatatgaaaagattagtgaaaagaagatgtccactcctgttgaagttttgtgtaaggggtttcctgcagaatttgccatgtacttaaattactgtcgtgggctgcgctttgaggaagctccggattacatgtatctgaggcagctattccgcatccttttcaggaccctgaaccaccaatatgactacacattttgattggacaatgttaaagcagawagcggcacagcaggcagcctcttccagtgggcagggtcagcaggcccaaacccccacaggcaagcaaactgacaaaaccaagagtaacatgaaaggtttctaggcatgaattgaggaagagaagcagcagagcagatgattggagcagcatttgtttctcccaaaactagacattttagttcatatgtacactatccagtggttgtggacaaccatttacttggagtaaagaacttactttaagtataaactggccccggacagcattgctgatgctgatcctgcgctatagccgctgaaattgtgaatattaactgatgtagcgaaacat

SEQ ID NO: 3691 - DNA, 579 bp, Cricetulus griseus; identical to SEQ ID NO: 49

SEQ ID NO: 3692 - DNA, 566 bp, Cricetulus griseus; identical to SEQ ID NO: 50

SEQ ID NO: 3693 - DNA, 462 bp, Cricetulus griseus; identical to SEQ ID NO: 51
  misc_feature (154)..(170): n is a, c, g, or t
  misc_feature (355)..(372): n is a, c, g, or t

SEQ ID NO: 3694 - DNA, 580 bp, Cricetulus griseus; identical to SEQ ID NO: 52

SEQ ID NO: 3695 - DNA, 600 bp, Cricetulus griseus
agctgcccacaatgaatggctctgaaggtcgscccgagttctatgacttcgacctcatcatcattggtggaggctcaggaggactggcggcagctaaggaggcagcaaamtttgataagaaggtgctggtcttggattttgtcacaccaactcctctcggaactagatggggtctgggaggaacgtgtgtgaacgtggggtgcatacctaaaaagctgatgcaccargcggctttgttaggacaagccttgaaagactctcgaaactatggatggaaagttgaggacacagttaagcmctgactggkagawgatsacasagkctgtgcasaatcacmtcggctcsctgaattggggctaccgagtwgctcttcgggaaamgaaggtctactatsagaactgcctatgggaaattcatyggttctcacamgattamgtgcwaaaratarcmmmkgawmmgcaaaaaatttwttcagcaragcggkttctyatygccmcykgggaaaggscmcgctacctgggcatccctggagacaaagagtactgcatcagcagggatgatctttttctcctgccttactgccccggtaaaaccctagtg

SEQ ID NO: 3696 - DNA, 600 bp, Cricetulus griseus
cgagcgatgggcatctctcgggacaactggcacaagcgccgcaagaccgggggtaagagaaagccctaccacaagaagcggaagtatgagctgggacggcctgctgccaacacgaagattggtcctcgtcgtatacacacagtccgagttcgaggaggcaataagaagtaccgtgccctaaggttggacgtgggaaacttttcctggggctctgagtgctgtactcgaaaaacaaggatcattgacgttgtctacaatgcatccaataacgagttggtccgcaccaagaccctggtgaagaactgcattgtgctcatcgacagcacaccgtaccggcagtggtacgagtcccactatgcactgcccctgggccgcaagaagggggccaagctgacccccgaggaggaagaaatattaaacaaaaagcgatcaaagaaaattcaaaagaaatatgatgagaggaaaaagaatgccaaaatcagcagccttctggaggagcagttccagcagggcaagcttcttgcctgtattgcctcaagaccaggccagtgcggcagagcagatggctatgtgctagaargcaaggagctggagttctac

SEQ ID NO: 3697 - DNA, 629 bp, Cricetulus griseus; identical to SEQ ID NO: 55

SEQ ID NO: 3698 - DNA, 600 bp, Cricetulus griseus
ctttcctggatccctcctcactggacccgagtgtggtggcagctcgggctggggcccctggtttccagagggtctgggctgtttcggctgctgtaactagatttagttcagtggtgctctggaggagaccgggagaagggttgaagtgtgaggctgggtggatgggaaaattagttttggtcttcacatctctggtttcatttttgctgtcgtagcgcttgttgctgtctctatgttaaaatgccaaaaatgatctagttgtcgctttcctcctgctccagcactccacagcagcttctggctttgtgaggtgtttgtctcagccagtgccatgacctggcaggaacagatctgggttcccactgtctcccatcatgtgtccgactatagtccgtcgggacaagcttctgcaaaactaacctgctttgtccggtttcccccagacaccacctctcgcttccacttgccgcctgagccttcctggtctctctctggctagtgctgcacagwgtctgcttctgctgtcctggaggtctcctgaagttgtgtggkcaccmararggccaaggacgcamtagccctgagctgagctgggctcat

SEQ ID NO: 3699 - DNA, 600 bp, Cricetulus griseus
tgtcatcaaccccatggccttgcgacagcgtgaagaactacgggagaagctggcagctgccaaggaaaagcgtttgctgaatcaaaaattggggaaaataaagactctgggggaggatgacccctggctagatgacaccgcagcctggattgagaggagccggcagctgcagaaggagaaggacctggcagagaagcgggccaagctactagaggagatggaccaagaatttggtgtgagcactctagtggaggaggagtttgagcagcggcgacaggacctgtatagtgcacgggacttgcagggcctcactgtggaacatgccattgattcttttcgagaaggggagactgtggtccttaccctcaaggacaaaggagtgttgcaggagggggaggatgtgctggtgaatgtgaacatggtagacaaggagcgggcagacaagaatgtggagcttcggaagaagaagcccgactacctgccgtatgcagaagacgagagtgtggatgatttggcacagcaaaaaccccgctctatcctggccaaatatgatgaggagctggagggcgagckgccacattccttccgtttggagcaagg

SEQ ID NO: 3700 - DNA, 600 bp, Cricetulus griseus
cgatgtgtgtacatcctggactgctggtctgatgtattsatctggcttggccgcaagtccccaagactagtgcgtgctgctgcactcaaactaggtcargagctgtgtgggatgctgcaccggccacrccatgcagyggtcagccgcagyctggaaggcaccgaggctcaggtgttcraggctaagttcaaaaattgggacgatgtgttgacagtaractacaactcraaatgcasaggctgtgctgcagggccaggggctctctsggaaagtaaagcgtgacactgakaagaaagaccasatgaaggcwkacctcactgcactcttsctgmcacggywgccaccaatggcmctggctgakgcmsabyamctgawggwrgaatggaatgavgacctkgatggcwtrgaakgcttsgywttggasggmasgaarwkcactcgaactgccrkaggamrartktggccacttmtacmcacaggactgctwkgtstwcytctgcargtwctgggtgcctgtgkagtatgacgaggaagagaagacggaagtcaaggaagggaagggcctcggtcatggcacagaaggggaggaagccaaaactt

SEQ ID NO: 3701 - DNA, 532 bp, Cricetulus griseus
atatatattatgctgcttccttaaactacttgytgctttakgatcaattkatatctttkttttcttcccttwccttgtcacctcaggtgcaaatctgaactcamgtgtctgcttttccattttctctktgccccatctttcccccattatccattwgactttattttaaataattgcatcagtctttaaaaaaaatatcaraaccaasgmratwtcaaasaaagctcaaagtttctwyymctggtgactttggaaagcaaccasaattgtcatatagatatatatggtcccttaaaatgcttttgtgtatgyggtgtttaaaaacagttaacttcacagtatctaggtctgartgtcataagtmctcttmacaccctgtccttgcaacaagtttccaaaagagtgtatgcrccttatagtctcagkscacacccatggagagatagtgcagttggkgacactttctagtcccagagctyacatggracctgagggtattaatgtggatcagggtgaawtgscctttctgyac

SEQ ID NO: 3702 - DNA, 581 bp, Cricetulus griseus
catttgtgttatgtgtttcttaagcatctctttctgtcccacattgcccatgcacgtggcatgcatgggtcargggtcttttcttgttgccctaakcacatggcacgggaraggagttctgccatgtgtcacgggttakaatgtgtkatgktggagtcccccgatgctgcttttctgaactcgamccactgctgcagcccttacagctgakcctggcccatgtargtgagtctttccctatccccacttgccggkcccrtgggtccctgccatttgcctakctgcccggcattctttgtgctctacacacatggtatgcakgggggccgcargastytttcssacccctgkattggyytarggtctggagttaccagcagcacccctaccccargkctctctgccttgagccacatggagctagagcgtatgaacttatctggcctgatccggacatctaaatggccctaaaggtattaagaactataaaagggactttgacaaaaattttatgttaacctaaaaatatcaaaaagggcggccgccaccgccggggagcttcaacttttggtccctctatt

SEQ ID NO: 3703 - DNA, 600 bp, Cricetulus griseus
  misc_feature (90)..(110): n is a, c, g, or t
agaccaggactatgcagctcattttgctgatcctgacaccttaktcaactgggactttgtggaacaagtgcgcatctgtagccatgaagnnnnnnnnnnnnnnnnnnnnntctatccaccgactgcagccaagataacccgctgtggacacattttctgctgggcgtgcatcctgcactacctttcactcagtgagaaagcctggagtaaatgtcccatctgctacagttctgtgcataagaaagacctcaagagtgttgttgccacagaatcacgccagtacgttgtgggtgataccattacaatgcagctgatgaagagagagaaaggagtgttggtggccttgcctaaatccaagtggatgaatgtagaccatcccattcatctaggagatgaacagcacagccagtactccaagttgctgctggcctctaaagagcaagtgctgcaccgagtagttctagaagagaaagtagcactggagcagcagctcgcagaggagaagcacactcctgagtcctgctttattgaggccgctatccaggagggtaagattcgggaagaggctctgtctggagtacctggaggcaaaagggaagg

SEQ ID NO: 3704 - DNA, 600 bp, Cricetulus griseus
  misc_feature (52)..(66): n is a, c, g, or t
  misc_feature (86)..(104): n is a, c, g, or t
accttcaakacagtatttgctgagcacatcaktgacgagtgtaagaggcgtnnnnnnnnnnnnnnncacaaatctaagaagaaggnnnnnnnnnnnnnnnnnnngaaatggcaggatgacatgggcaagaaacagctggagaasgacttcaacagcatgaagaagtactgccaagtcatccgcataattgctcacactcagatgcggctgcttcctttgcgccagaagaaggcacatttgatggagatccakgtgaacgggggcaccgkggctgaraagctagactgggcccgagagaggttggagcagcaggttcctgtgaaccaggtgtttggacaggatgagatgattgatgtcatcggggtgacaaaaggcaaaggctacaaaggggtgactagtcgttggcatacaaagaaactgccccgcaagacccatcgagggctgcgcaaagttgcctgtattggagcctggcaccctgcccgtgtggctttctctgtggctcgagctgggcagaaaggctaccatcaccgaacggagattaacaaaaagatttacaagattggtcaaggctacctcatcaaggatggtaagctgattaag

SEQ ID NO: 3705 - DNA, 579 bp, Cricetulus griseus; identical to SEQ ID NO: 63

SEQ ID NO: 3706 - DNA, 600 bp, Cricetulus griseus
ctcatttggattccatcaggaaagacatggtcatcctagagaaaagtgaatttgcaaatctgagagcagagaatgagaaaatgaaaattgaattagatcaagttaaacagcagctgactcatgaaagcagtcgaatcagagcagataataagttggacatcaacctggraaggagcagagtaacagacatgttcacagatcaagaaawgcaacttatggaagcaaccaatgaatttaccaaaaaggatacccaaaccaaaagtattatttcagagaccagtaataaaattgacactgaaattgcttccttaaaaacactgatggagtcgaacaaacttgagacaattcgatatcttgcagcctcggtgttcacttgcttggcaatagcattggggttttatcggttttggaaggaatattgacactcctcttgctgctgatcactccataaactgtactttctacatattcttcaaagtactcatcgactaaatagaagtgtttggatattttatttttaggttatatgactttattatgttgaaaagctgtctcccaaagcctggtttgagataaaaggacattttgtccttatccttt

SEQ ID NO: 3707 - DNA, 600 bp, Cricetulus griseus
aaaacccttatgkggkggccacagytgcascctgggtcctytraacararactytggkgkgggctttcacaaratggkcagkgaattcctgataaggaracttggkgaacacagtytytttccaaaggtcgggggttaggtasctgtaggtyttgraratggcatmaaaggkggccttggcaaakttgcccasggkggcagkgcascccctggctgacgtgtagcaktcatmaataccavccatcatcaktakcttyttaggcmcaggabcararacratsccaktgcctytgggggcarggatradacscmccaacacadasccacagbggcctgtcaytttacatggaacakkgkggggcttgccaatyttgttcccccaktascctyttckyacagggacaatggaaagcttggccasgatgatggcccctcggatggcagkggctacctccttggagcacttaacaccaaraccaacwtgaccrkkgtagbccccaatagcracraaagccttgaacctggtccgctggccagcccaagtctgcttctgcactggcatgatctttaaaacctcatcctttagggatgcgcccagga

SEQ ID NO: 3708 - DNA, 600 bp, Cricetulus griseus
tccaaaacgtcctatggctggattgagattgttggatgtgcggatcgttcctgctacgacctgtcctgtcatgctcgagtcaccaaagtcccactagtagctgagaaacctctgaaagaacccaaaatagttaatgttgtacagtttgagcccaataagggagcagtgggcaaagcgtacaagaaggatgcaaagctggtgatggagtacctcagctcctgtgacgaatgctacatcacagagatggaacagctgctgaacgagaaaggggaattcactattgaaaccgaagggaagacatttcagttaacgaaagacatggtcagtgtgaagagattccagaaaacactacacgtggaagaagttgttccgagtgtaattgagccctcctttggcctgggcaggatcatgtataccatattggagcacacattccatgtccgagagggagatgagcagagaacgttcttcagtttcccagctgtggttgctccattcaaatgttctgtccttccactgagccaaaaccaagagttcatgccatttgtcaaggaattatctgaagctctgaccaggaatggcgtgtctcataaagtagat

SEQ ID NO: 3709 - DNA, 600 bp, Cricetulus griseus
tgaatgcagatgatccagacctgcaaaggcctgatgaagaggctattaaagagataacagagaagacaagagtagccttggagaagtctgtgtcgcaraargttgctgcagccmtgcctgttcgtgcagctgacaagctggstcctgctcagtatatycgctacacaccatytcagcaaggagtagcattcmactctggagctaaacagagggttattcggatggtagaaatgcagaaagatccaatggagccgccaagattcaagattaataagaaaattccccggggaccaccatctcctcctgcacctgtaatgcattcctctagtcggaagatgactgtaaaggagcaacaagagtggaagatccccccttgtatttccaacatgaaaaacgcaaagggttacacaattcctctggataaacggctggctgctgatggaagaggacttcagactgtacacataaacgaaaattttgccaaactggctgaagcgctatacattgctgatcggaaggctcgtgaagctgtggaaatgatagcccaagtggagaggaagatggctcataaagaaaaggagaaacatgaagagaaactta

SEQ ID NO: 3710 - DNA, 584 bp, Cricetulus griseus; identical to SEQ ID NO: 68

SEQ ID NO: 3711 - DNA, 600 bp, Cricetulus griseus
cggaggcgcggggatagaaggagcaccatgtccgcggaagttcccgaggcagcgtcggcggaggagcaaaaggaaatggaagataaagtgactagtccagagaaagctgaagaagcaaagttaaaagcaaggtatccacacttgggacaaaagcctggaggttccgattttttaaggaaacgattgcagaaagggcaaaagtattttgattctggggattacaacatggcaaaagcaaagatgaagaacaagcagcttcctgcagcagccccagataagacagaggtcactggtgaccacattcccactccacaggaccttcctcagcggaaaccatccctggttgctagcaagctggctggctgattaaaagagctgaactgcatgagtcttctaatgtcctttatttctccttactacgttacttacccactttctgtttcctttcactcactatgtcatttgagactgacagctttgcaggtagtggtagtatgtgctgctgttgtaagggagcatacatgtgtagaggtttcggttagtttaacagtgcactgatgcaaaggacatgtaacagcaacttaagttacgataattgta

SEQ ID NO: 3712 - DNA, 543 bp, Cricetulus griseus
gagagcggtgtgtggagccttcggcttgggagkaaggcgctgtccgaacgaacargacccgagcggcagctgtgctcccgccttggaagtggttcaatcatggttgaaattaaraagatctgttgcattggtgcaggctatgttggtgggcccacatgcagkgtsrttgctcatatgtgccctgaaatcagggtaacagttgttgatgtcaatgagtcaagaatcaatgcatggaattctccaacccttcctatttatgagcctggattaaargaagtggtakaatcctgtcgagggaaaaatctgtttttttctaccaatattgatgatgccatcagagaagctgacctagtatttatttctgtaaacacaccaacaaaaacctatgggatggrgaaaggccgggcarmawatctgaaatatattgaagcttgtgctcgacgcatwgtgcaaaactcawatggggtcaaaatcgtgactgagaaaagcacagtccctgtgcgggcagcatagagcatccgccgtttatttgatgccaacaca

SEQ ID NO: 3713 - DNA, 580 bp, Cricetulus griseus; identical to SEQ ID NO: 71

SEQ ID NO: 3714 - DNA, 600 bp, Cricetulus griseus
agaacaccagtgatgtcaggatcgcmgagacctctttctgcacgggcatacagcattgatggcccaaatacttcaaggcctcagagtgcccgcccctctattagtgaaataccagagagaactatgtcagttagtgatttcaattactcacggactagtccttcaaaaagaccaaatgcaagggttggttctgaacattctttattagatcctccaggaaaaagcaaagttcctcatgactggcgagaacaagtacttcgacatattgaggccaaaaagttagaaaagcatccccagacatccagtccaggagattcttgccaagatgatagattgatttcaggagagcagaactactcaccaggtgcacttagtcacaaagatcttccagacagcttgatgaaaatgcctttgagtaatggacagatgggccagcctctcaggcctcaggcaaattatagtcaaatacatcatccccctcaggcatctgtggcaaggcatccctctagagaacaactcattgattatttgatgctgaaagtggcccaccagcctccatatacacatccccattgttctcctagacaggctatgagctgg

SEQ ID NO: 3715 - DNA, 1184 bp, Cricetulus griseus; identical to SEQ ID NO: 73
  misc_feature (1029)..(1050): n is a, c, g, or t

SEQ ID NO: 3716 - DNA, 411 bp, Cricetulus griseus; identical to SEQ ID NO: 74

SEQ ID NO: 3717 - DNA, 600 bp, Cricetulus griseus
  misc_feature (562)..(562): n is a, c, g, or t
ttcggctttgggtgaaaaaaaatggcccgaaccaagcagaccgctaggaagtccacgggtgggaaagccccccgcaaacagctggccaccaaggcagccaggaaaagcgcgccctctaccggcggggtgaagaaacctcaccgctacaggcccgggaccgtggctstragagagatccgtcgctaccagaagtcgactgagctgctcatccggaagctgcctttccagaggttggtgagggagatcgcccaggatttcaaaacggacttgaggtttcagagtgcagccattggtgcccttcawgaggccagtgaagcgtacctggtggggttgtttgaagacaccaatctgtgtgccatccatgccaagagagtcaccatcatgcccaaagacatccakttggctcgccggatacggggggagagagcttaagtcaaggcggtttttatggcattttgtagtaaattctgtaaaatacttwrgtttaatttgtgactttttttgtaagaaattgtttataatatgttgcatttgtacttaagtcattccatctttcactcangatgaatgggaagagtgactgtgcagacctcagtgacg

SEQ ID NO: 3718 - DNA, 580 bp, Cricetulus griseus; identical to SEQ ID NO: 76

SEQ ID NO: 3719 - DNA, 600 bp, Cricetulus griseus
gaagccccaggctgagcggaaagaagaaaaaaargcagctgccccagctcctgaggaggagatggacgagtgtgagcaggcacttgctgctgagcccaaggccaaggacccctttgctcacctgcccaagagtaccttcgtgttggatgagtttaagcggaagtactccaatgaggacacagtgtctgtggcgctgccatatttttgggagcactttgataaggatggctggtccctgtggtatgctgagtaccgcttccctgaagagctcacccagactttcatgagttgcaacctcatcactgggatgttccagcgattggacaaactgaggaagaatgcctttgctagtgtcatcctctttggaaccaacaatagcagctccatttctggcgtttgggtcttccgaggccaagaacttgcctttccgctgagtccagattggcaggtggactacgagtcgtatacatggcggaaactggatcctggtagcgaggagacccagaccttggttcgagagtacttttcctgggagggggcctttcatcatgtgggcaaaaacttcaatcaaagcaagatctttaagtgaacatgttttgc

SEQ ID NO: 3720 - DNA, 540 bp, Cricetulus griseus
  misc_feature (90)..(113): n is a, c, g, or t
ctctccctctccctccctgctgctgccggcctccgggatccaaccgacgccatgggtttcggagacctgaaaacccccgcgggcctccannnnnnnnnnnnnnnnnnnnnnnncaagagctacatcgaggggtacgtgccatcgcaagcagatgtggccgtctttgaagccgtctctggtcctccgcccgctgacctgtgtcatgctctgcgctggtataaccacatcaagtcttacgagaaagagaaagccagcctgccaggagtgaagaaatctctgggcaagtatggccctgccagtgtggaagacaccacaggaagtggaactgcggatgctaaagatgatgatgacattgatctcttcggatcagatgatgaggaggaaagcgaagaagcaaagaggctccgagaagagcgccttgcacagtatgaatcaaagaaagctaaaaagcctgcggttgtcgccaagtcttccatctttctatatgtgaagcctcgggatgatgacacagacatgacataattagaggagcgtgtcaga

SEQ ID NO: 3721 - DNA, 579 bp, Cricetulus griseus; identical to SEQ ID NO: 79

SEQ ID NO: 3722 - DNA, 591 bp, Cricetulus griseus; identical to SEQ ID NO: 80

SEQ ID NO: 3723 - DNA, 600 bp, Cricetulus griseus
tgatttcttctgcyagttctctgttctttggcattttcttctctccctggacaggcatcgagttgcctgagtgtattcagagcactctggacttgctgtctargcatgttcctgtctcacagatgcagcgctcatgggctcggaactgctgtgtcactttatcgagcagagccaggtgcctctcttctgtgccctctagatcctctctctctacctctaccccaagtgcctctgccaccgtgacttcagaaaagcttggcagtccctctagcaacatcctaagttcagagattgtctggttggtgagttaatagctcagccgaatgctcacattgtctcagtgaggcaactactgaccaagatggttcattgttgcctctgtgagtcagagtagacagcacatttgtttttccttgcacgcttggcaagtggctctggctgattaatatatgcaggtggtggtacaaatgcttgtgaggttccccattttatccctgtacaaacaccagaagcgtgggcaattgcccaagaagaggccctgcttcctgaagccaggtgtgatgcaaagtttgaactgaaatgtggtagctcaggtgacac

SEQ ID NO: 3724 - DNA, 600 bp, Cricetulus griseus
  misc_feature (80)..(99): n is a, c, g, or t
aagttcagtgtctagaggcacagctcccagtgataatagggtgacgtccttcagagaccttattcatgaccaagatgagnnnnnnnnnnnnnnnnnnnngacagaggagcaggttttatgctgggggctcaragagaagtggacagcagattgttggtsctccccggaagagaagtcccaacgagctggtggatgatctgtttaarggtgccaaagagcatggggctgtasytgtggagcgagtgaccaagagccctggagagaccagkmaaccgakaccatttgcaggakggggctaccgccttggagcagcaccagaggaagagtctgcctacgtggcaggagaawrgasgcgacattcgggccawkatgtycatgyagtgctgaagctctgsagawctggattcagccttgacaatggtgaactcagaagctaccaagacccatccaatgcccagtttctggagtctatccgtagaggrkwktgtgmmgcscaagggagcttysrawgccttmrctsrcgwgggcsrtraactggryagcacggccccccatgtattgaacaccagctctccagcccagcaagcagataatgaagcc

SEQ ID NO: 3725 - DNA, 605 bp, Cricetulus griseus; identical to SEQ ID NO: 83

SEQ ID NO: 3726 - DNA, 876 bp, Cricetulus griseus; identical to SEQ ID NO: 84

SEQ ID NO: 3727 - DNA, 595 bp, Cricetulus griseus; identical to SEQ ID NO: 85
  misc_feature (93)..(139): n is a, c, g, or t
  misc_feature (167)..(213): n is a, c, g, or t
  misc_feature (246)..(298): n is a, c, g, or t
  misc_feature (328)..(374): n is a, c, g, or t
  misc_feature (452)..(543): n is a, c, g, or t

SEQ ID NO: 3728 - DNA, 600 bp, Cricetulus griseus
tttgacaagttcaaatatgatgacgcagaaaggaaattctacgagcagatgaatgggcctgtgactgctggctcccgccaggagaatggtgccagcgtgatcctccgtgacattgcaagagccagagagaacatccagaaatccctggccggaagctcaggccctggggcctccagtggacctggtggagatcatagtgagctcattgtaaggattgccagtctggaagtggagaaccagaatcttcgaggcgtggtacatgatctgcagcagtccatttccaagttggaggtcaggctgaacactctggagaagagttcacctactcacagagccacagcccctcagacgcaacatgtgtctcctatgcgtcaagtggagcscccaaccaagaargcggccacaccggcagaggatgatgaggacgatgacattgacctgttcggcagtgatgaggaggaagaagataaggaggcagcccgactacsaraggagaggcttcgtcagtatgcagagaagawagccaagaaaccctcactggtggccaaatcctccatcctcttggatgtcaaaccttgggatgatgagacaaatatggcc

SEQ ID NO: 3729 - DNA, 585 bp, Cricetulus griseus; identical to SEQ ID NO: 87

SEQ ID NO: 3730 - DNA, 578 bp, Cricetulus griseus; identical to SEQ ID NO: 88

SEQ ID NO: 3731 - DNA, 600 bp, Cricetulus griseus
tctatatttaggagccatcacacttggggagaagaatagaaagaaaatgcagaaccctctcctcagaaaacgggagagtgaaaatatttctcgagctgtgtgtgctctcctcaactctggaggtggagcgatcaaggttaaaattgaaaatgaaaattatagcttcaacagggatggcctgggactggatttggaagcctctctttgtaaatgtctgccatttgtggggaggcacctagacttcatggagcagggaggatacttttacatctttgtgaaatcttggagtgcagacatctttgggctgccgattggcaccctgagaaccaatttgtacgtaagaacctggtcgtcctcagttgaagtggttgcctctgatgctcttgagttcctccaagaactggaggaaaatggagggagatcctgtgtcagaccagagcctcctgtatgtagagcctgccctggagtagaagaagaaagtctcctagaggacctggctgctgcagttttcaacaagacccaatttcagtaccaggaagacttccccttcaccaggtcaacctatgctgaagtgacattgctttcaaggaaacagctgca

SEQ ID NO: 3732 - DNA, 499 bp, Cricetulus griseus; identical to SEQ ID NO: 90

SEQ ID NO: 3733 - DNA, 600 bp, Cricetulus griseus
  misc_feature (175)..(194): n is a, c, g, or t
  misc_feature (571)..(571): n is a, c, g, or t
cgcykcygscymygkgtctckrcmctaggagtcttcgtcctckcccgaccgcgcaatggaaggktaccacaagccggatcakcakaakctgcakgccctgaaggacacakccaatcgcctgcgcatsakstccatccakgccaccaccsccsctggctccggccrccccacatcnnnnnnnnnnnnnnnnnnnntcatggctgtcttgtttttccataccatgcgctacaasgccctggatccccgaaaccctcacaatgatcgctttgtgctctccaagggccatgcagctcccatcctgtatgcagtctgggctgaagctggcttcctacccgagacagagctgctgaacctgaggaagatcagctctgacctggatgggcaccctgtcccaaaacaagccttcaccgatgkggccactggctccctgggccarggcctgggagctgcttgygggatggcctacacaggcaaatacttcgacaaagccagctatcgtgtctattgcatgctgggagatggagaagtgtctgagggctctgkctgggaggccatggsctttgccggaatntacaagctagacaacctccttgccatttt

SEQ ID NO: 3734 - DNA, 600 bp, Cricetulus griseus
  misc_feature (313)..(357): n is a, c, g, or t
  misc_feature (493)..(508): n is a, c, g, or t
ccatcttcttcactagaaatggctcatgtgctctgtaacagggccaggctggtttcctatctcccaggattctgttctttagtgaaaagagttatcagtccaaaagccttttcaactgcagggtcttcaggttctgatgagtctcatgtggccactgcacccccagatatatgttcccgaacagtgtggcctgatgaaactatgggaccatttggccctcaggatcagaggttccagcttcctgggaatatgggcttcgattgtcacctcaatgggactgcttcacagaagaaaagcctgacccataaaactnnnnnnnnnnnnnnnnnnnnnnnnnnnnnnnnnnnnnnnnnnnnntttgtgatggctcaktatgtgaacgagtttcagagtagtgatgcacctgtcgaacaagawattaacagtgcagaaacttactttgaaagtgccagagttgagtgtgtaatccagacatgtccagaactgctgcaannnnnnnnnnnnnnnntttttccagaagtggctaataacaaactaatgattctgactgtracacaggaaactgaaaatgacatgactgcttggagtgaagaggtatat

SEQ ID NO: 3735 - DNA, 600 bp, Cricetulus griseus
  misc_feature (557)..(557): n is a, c, g, or t
tctgcagtggcctttcgtgcacagtacttccagcagccaacatgcgtttcttttctgttgctttgttttgttttaggaaaacacttttctccctgacagtttatagatgttgataaatgtcctgtcattctggtcaggagacggtcatgatgaccattggcccagggctccaactctgtggcttagacctcttttctaaaataatggtttttctgcatggcagtcctgtcagaaggtgtcaaaagcattctcaagygctgcctatgacattcttagaattttctggtattacacagttccacacaaatgttcctgctgtgtgaacagagacttctcctccatcctggtagttaaatgatgtcacagggaggcctgcrttggtcawgctggccttctcagtgactcagggatcattctgcatccgtgcatacatgcaccagatatgatgttctctgggcaaacaggccctttcctgtctgtcctgggcacttgtttatctacagcttctcctttctttgccttcgacacatcttatggactatgtatgtattatccangcttgatggaaactggtgcttgtagtcaggtctgtaaagcctt

SEQ ID NO: 3736 - DNA, 567 bp, Cricetulus griseus; identical to SEQ ID NO: 94

SEQ ID NO: 3737 - DNA, 600 bp, Cricetulus griseus
atgaakgcaaakaaaacatcagakctgctgttgcakcgggatgcaygcaggttcaagacctggagctgccttcaktggaggtggatccctgyggagatgctcakgctgctgcagaakgagccgtgcttggtctctatgagtyygatgacctaaakcagaaaaagaaggtggctgtatcagcgaagctctatggaagtggcgatcaakakgcctgggagagaggggtcctctttgskkctgggcagaacttggcccgccagctgatggagtctccatccaatgagatgacaccaaccagattcgctgaaattattgaaagaaatctcaaacatgccagtagtaaaacagaggtccatatcagacccaagtcttggatagaggaacaagaaatgggctcgttccttagtgtggccaaggggtctgaagaaccaccagtcttcttggaaatccactacacaggcagccccaatgcaagtgaagcacccctggtgtttgtgggaaagggaattacctttgacagtggaggtgtctccatcaaggcttctgcaaatatggacctcatgcgggctgacatgggaggagctgcaacaatatgctcgg

SEQ ID NO: 3738 - DNA, 835 bp, Cricetulus griseus; identical to SEQ ID NO: 96
  misc_feature (412)..(460): n is a, c, g, or t
  misc_feature (517)..(563): n is a, c, g, or t

SEQ ID NO: 3739 - DNA, 600 bp, Cricetulus griseus
agaacatcatcctggmrgagggcaasgakatcctggtgggagatgtggggcagactgtggacgacccctacaccacttttgtcaakatgctgcccgacaaggactgccgctatgctctctacgacgcaacctatgagaccaakgakagcaagaaggakgacctggtgttcatcttctgggcccctgakagtgcaccccttaagagcaaaatgatctatgccakctccaakgatgccatcwagaagaagctgacaggaatcaagcacgaattacaagcaaactgctacsakgaggtcaasgaccgctgcaccctggcakawwaactadgtggcagcgccgtcatctctctggwrggcaagcctttgtgakccgcctccadccccctgcctggagcatctakcakccccagacctgctcatgggtgttgcaggctgccccttttcctgccagaccggaggggctggggggatcccagcagggggagggtaatcccttcaccccagttgccaaatgtcctccccaccccctggaccgtgctcttccctccaccctgacggttctggccatcccaaactgcttctgatcctctgattcctcttg

SEQ ID NO: 3740 - DNA, 419 bp, Cricetulus griseus; identical to SEQ ID NO: 98

SEQ ID NO: 3741 - DNA, 580 bp, Cricetulus griseus; identical to SEQ ID NO: 99
  misc_feature (417)..(470): n is a, c, g, or t

SEQ ID NO: 3742 - DNA, 466 bp, Cricetulus griseus; identical to SEQ ID NO: 100

SEQ ID NO: 3743 - DNA, 540 bp, Cricetulus griseus
  misc_feature (69)..(99): n is a, c, g, or t
cccggtctataagagctagttccaggacagcctccaaagccacgggaaaaaccctgtcttggaaggaannnnnnnnnnnnnnnnnnnnnnnnnnnnnnnaaggaaggagggaaggaagggagaaagagagaaagagagaaagagagaaagagagagaagaaaagaacttcaagttaattatattaaaatgtttaatctctataaatatgaaatgaattaaagataaaattttctcctgaaatttaagtgcacttttaaagataagcacttttgatgtctgattgagcaaacataaaacagacaaaaaccacccccaaccacttcgcccttcaaagctaacggatcaaatgtacaaagtgcataaattrgattctcttgagtacttcaagcatcttgaagkgaggactgggaagatyaccagggaaaatagacrgatcaaatgtagtcaataagagccctctcttttccatgggtaacagtaaaaagatttgtcaatgcgggagacaaaggccagcaagatagaccatagacttagacccc

SEQ ID NO: 3744 - DNA, 600 bp, Cricetulus griseus
caactgaggtgctggaaaagagaaataagattcgggaacagaaccgatacgacctgaagacagcaggaccacagtctcagctgctcgcaggaattgttgtggacaagcctccttctaccatgcaatttgaagatgatgatcagggcccaccagctcctcctaacccattcagtcatctcacagaaggggaccttgaagaatacacgaagacaatcgaaagawagcaacgaggcctggacgamrctgagcwgkwktcmctctcagatgatgcagcatctgtttcacaaattcagtctcagactcaatcaccgcaaaatgtccctgaaaaattggaagaaaaccatgagctgttttccaagagcttcacttccatggacgtgcctgtcatgattgtgaacggcaaggatgagatgcacgatgctgaagatgagcttgctcagcgggtcagtaggttaaccacaagctcgaccatagagagcatcgagatcaccattaagtctccagagagaacccaagaggtcatgtcacctgatggctcgccttcaaagtcaccatccaagaaaaagaagaaattccgcacaccttcttttctcaaaaaga

SEQ ID NO: 3745 - DNA, 579 bp, Cricetulus griseus; identical to SEQ ID NO: 103

SEQ ID NO: 3746 - DNA, 581 bp, Cricetulus griseus; identical to SEQ ID NO: 104

SEQ ID NO: 3747 - DNA, 600 bp, Cricetulus griseus
ggccctggtcgtactccatttgggaatccattaargacttctttgatactgagatcaagaaactcggtgttgagaactgctacttccccatatttgtgtctcargctgctytagagaaagaaaagagtcacaytgaggactttgcccccgaggttgcttgggttacaagatctggtaagacagagctggcagagccaattgccatccgacctactagtgaaacagtaatgtatcctgcatatgcaaaatgggtgcagtcccacagagacctgcccatcaggctcaaccagtggtgcaatgtggtgcgctgggagtttaagcacccacagcctttcctccgcactcgggagttcctgtggcaggagggacacagtgcctttgctaccttcgaggaggcagctgacgaggtcatgcaaatccttgagttatatgctcgagtgtatgaagagctcttggcaatccctgttgtgagaggaagaaagactgaaaaggagaagtttgcaggaggagactatacaaccacagtagaagccttcatatctgccagtgggcgtgctatccagggagcaacatcacaccacttaggccagaatttttcca

SEQ ID NO: 3748 - DNA, 576 bp, Cricetulus griseus; identical to SEQ ID NO: 106

SEQ ID NO: 3749 - DNA, 269 bp, Cricetulus griseus; identical to SEQ ID NO: 107

SEQ ID NO: 3750 - DNA, 500 bp, Cricetulus griseus
  misc_feature (203)..(223): n is a, c, g, or t
caacttagtgttttgttgagtaactaactgttttgcaagaaatatttccatttagaaacataaaagattaatgttccaattatgcatagcttccccattatcaatcaggagagattatggggcacttgggaactattttgtctttataacaggcgtttgcaaggctgagcataatagataaatcagttccctctgaaagtgtnnnnnnnnnnnnnnnnnnnnngaaaaaaagagccaggtggkcaaacttaaattaacatcatcttgttaaagcatattttatttcactgagagaaattcaatatcaaagacttttatatactcaattaccaagaaatctttttttaagtacaatttaaaaatcattgaaaatgtgatccacatcatagccattcttttcctcaaacttaggtggacaagcttctcawagtggcagtgggaactggcatgtcacaaawwacgtartartgcttwcargcagtttgcccctgtaagaacca

SEQ ID NO: 3751 - DNA, 600 bp, Cricetulus griseus
  misc_feature (89)..(111): n is a, c, g, or t
  misc_feature (270)..(314): n is a, c, g, or t
gcgggggccacatccttgtgctttgtgtaccctcttgattttgcccgtacccgtctagcagctgatgtgggtaaagctggagctgaaannnnnnnnnnnnnnnnnnnnnnntgcctggktaaratctacaaatctgatgggattakgggccygtaccaaggctttaatgtgtcagtacagggcattatcatctaccgagctgcctactttggtatctatgacactgcaaagggaatgcttccagatcccaagaatacccatatcttcatnnnnnnnnnnnnnnnnnnnnnnnnnnnnnnnnnnnnnnnnnnnnnttcctatccttttgacacggttcgtcgacgtatgatgatgcagtctggacgcaaaggaactgatatcatgtatactggcacaattgactgctggaggaagattgctcgtgatgaaagaagcaaggcttttttcaagggtgcatggtccaacgttctcaggggcatgggtggtgcctttgtgcttgtcttgtatgatgagatcaagaagtacacataattatgtcttaagtttctccccaagagcaggcatgttgtacaatacaccatatcttgaacattctggaca

SEQ ID NO: 3752 - DNA, 600 bp, Cricetulus griseus
cttggagtgatcgcctgcattggggagaagctagatgaaagggaggccggcaccaccgacaaggttgttttcgagcaaaccaaggccatcgcagataatgtgaaggactggaacaaagttgtcctggcctatgaacctgtatgggccattggtactggcaagactgcaacacctymacakgcccaggaagtacacgagaagcttcggggatggctgaaatccaatgtctctgatgcagtggctcaaagcacccgaatcatttatggaggttctgtgactggagcaacctgcaaagagctggcaagccagcctgatgtggacggcttccttgtgggtggtgcttccctcaagcctgagtttgtggacatcatcaatgccaaatgttaaacaccagcatcttccctaccctccgctaggccaggattaggttgcccaggagcttaagaactgctcccacaagtcacatgcttctgatgtcatcgccccatcttgtttgctaatccacactgtaccttcctacacctttgacacctcccttataaggttgggaccaggccaatccctttaccacttacaatgaatgaaataatgtcacctatt

SEQ ID NO: 3753 - DNA, 598 bp, Cricetulus griseus; identical to SEQ ID NO: 111
  misc_feature (32)..(46): n is a, c, g, or t

SEQ ID NO: 3754 - DNA, 600 bp, Cricetulus griseus
  misc_feature (214)..(256): n is a, c, g, or t
caaccatacagccacgcacattctgaacttcgccctgcgctccgtactgggggaagcggaccagaaaggctcactggttgctcctgatcgccttcggtttgacttcactgccaagggagccatgtccacccagcaaatcaaggtakgctgaggagattgtcaatgccatgattgaggcagctaagcctgtctatacccaggactgtcccctggnnnnnnnnnnnnnnnnnnnnnnnnnnnnnnnnnnnnnnnnnnngacctatactgaccctgtgcgagtcgtttccattggggtccccgtgtcagagctgttggatgacccctctgggcctgccggctccctcacttctgttgagttctgtggaggaacgcatctacggaattccagtcacgcaggagctttcgtgatagtgactgaagaagctattgccaagggtatccggaggattgttgcatgtcacaggtgctgaagcccagaaagccctcaggaaggcagagagcttgaagagatctctgtctgtcatggagaccaaagtgaatgcccagactgcacccaacaaggatgtgcagcgggagattgccgaccttggtgaggccctg

SEQ ID NO: 3755 - DNA, 600 bp, Cricetulus griseus
tcggctcaacagagataaccttcataccagagaagatcagaggtggaatcctcactgcakatacgaakacagcagggagtgtgtgcctcttgatgcaggtttcaatgccttgtgttctgtttgctgcttctccatcggagcttcgcttgaaaggtggaactaatgctgaaatggcacygcagattgatyacaccatgatggttttcaagccaatcgtygagaaatyyggtkycaaatttgattgtgacwtyamaatgaggkgctattactccawawgggggcggygaggtkattgycckwatgtcaccarttaaacaktyskacccaataaatctgactgatcgtggctctgtgaccaagatttatgggagagcttttgttgctggagttttgccattaaaagtagcaaaagatatggcagcagcagccgtacgatgcatcagaaaggagatcagggatctgtacgtcaacatccagcctctgcaggagtccagggaccaagccttcggcaacgggagtggaatcatcattgttgctgagacatctactggctgcttgtttgctggctcatcacttggcaaaagaagtgtgaatgcagac

SEQ ID NO: 3756 - DNA, 564 bp, Cricetulus griseus; identical to SEQ ID NO: 114

SEQ ID NO: 3757 - DNA, 600 bp, Cricetulus griseus
gcgtacaggatacttgaaggggtatactctagttgagtatgaaacatacaaagaggctcaggctgccatggagggactcaatggtcaagatttgatgggtcagccaatcagcgtcgactggtgttttgttcggggtccaccaaagggcaagaggagaggtggccgaagacgaagcaggagtccagaccggagacgtcsttgatagatcctctgttgcccargtggtctctacacgagtccatttggttatgctgccttgcataaatagggctagggtagaacttgtgtttatatttaatttcttaccctatctacttagtattgctttgagttaaaacctaataataaatgttccattttgttttctacatttaagattattttactgttctggagactgtttatagtaaggccttctgagtcactgggaagacatgtctgtctggagtgtaattctgagtttctagaggctcgggcagagattgttcatcatttctttttcttagaagaccagagagcaggggtagtgaggttcttaaggcattaaggagtgattcttacatactcttgtgagcaaatactatattagtgcttctcctc

SEQ ID NO: 3758 - DNA, 579 bp, Cricetulus griseus
  misc_feature (61)..(78): n is a, c, g, or t
gcctyctgaargacratgtgtattgcgagctggcagakwrgcacatccatcakatcgtgcnnnnnnnnnnnnnnnnnnaggaagggggcaaggtacggaggatcaccagtgaaggacagatcctggagcagccgctggaccccagtctcatcccaaagctgatgagcttcctaaaactggagaagggcaagtttagcatggtgctactaaagaagactctgcaggtggaggagcgttacccttatccggtcaggttggaggccatgtatgaggtcattgaccaaggccccatccgcaggatcgaaaagatcagacagaagggttttgtccaaaagtgtaaggcctcaggcttagagggccatgtgctccaggaagggaacaatggcggcgggggagcaggaagcacaggcctgggcagtgagaagaagaaagaggagccaaggagagcacaagtccaccccaccagagagcctcagagaaagctggccaccaccaaggcagccattacccaacctcccccaaccccaagggccactacccttcctcctgctccagtcacaacagctactcgggccacgt

SEQ ID NO: 3759 - DNA, 600 bp, Cricetulus griseus
agataatcaatgctgattcagaggaccccaaatacattatcaatgtgaagcagtttgccaagtttgtggkggatctcakcgatcaggtggcacctactgacattgaagaarggatgagagttggtgtggaccgaaataaataccaaattcacattccactacctccaaagattgacccaacagttaccatgatgcakgtggaagawaaacctgatgtcacmtacagtgatgktggtggctgtaargagcabattgagaaattgagagaagtagytgaaacccctctactccatccagagagatttgttaaccttgggattgagcctccgaagggtgttctgctgtttggtccccctggcacaggcaagacactctgtgctagggcagttgctaacaggactgacgcttgcttcatccgagttattgggtctgagctcgtacagaaatacgtcggtgagggggctcgaatggttcgtgagctttttgaaatggccagaacaaaaaaagcctgccttattttctttgatgaaattgatgccattggaggggctcggtttgatgatggtgctgggggtgacaatgaggtgcagagaaccatgt

SEQ ID NO: 3760 - DNA, 582 bp, Cricetulus griseus; identical to SEQ ID NO: 118
  misc_feature (412)..(412): n is a, c, g, or t

SEQ ID NO: 3761 - DNA, 600 bp, Cricetulus griseus
gccgtgagtcgccgcagcaacagctatggtgtcagtaatcaacaccgtggacacctctcatgaggacatgattcatgatgcccagatggactattatggcacccgcctadmaacctgctcstssgrcaggtccstcaaaatctttgatgtgcgaaatggagggcagatcctcattgcakaccttasaggacatgaggggccagtatggcaagtakcctgggcccaccccatgtrcsgcaatakcctgrcctcctgtksctatgaccggaaagttattatctggaargaggaaaatggcacttgggagaagactcatgagcactcaggacatgactsctsagtgaactctgtatgctgggcccctcatgattatggcctgattttggcctstgggakctcggatggggccatctccctgctgacctatacaggggaaggccaatgggaagtgaasaagattaacaacgctcacacgattggctgtaacgccstcagttgggcccctgctgttgtgcctggaagcctcatakaccaaccatcagggcagaagcccaattacatcaagaagtttgcatcaggtggctgtgacaacctcatcaa

SEQ ID NO: 3762 - DNA, 600 bp, Cricetulus griseus
accagaagcccctgatggattccccrykkcckaaattcctttttgcttttgactagcatttcaaccttctggggtccctaacttcgtcccaaagtcagcaggaagcagtttggaaaagaatttcgccgtccattttccckggttraaatgctaagtcaaaaggaactcccttrcatggggatgmcartatctatcactccctgatggggatgctagagagacagcaattccatgattggaatttacamaraaaagawaatgggggaatgaaggaaccrgcttccttttggcagccataayrgyygaacatgtgcttgcyatramcytgycytrgwmacgtagaggtcagatgcctgtctcgtgacaaggaaccttaktcacttaraggtcagatgcctgtcttgtgacaaggaaccaatcggaagttagctggtggcgctatgctttatggctctgggtgtgctttacggacaagcgcacagcaatgacgtagagagcatagcaaccaccctgggagggcctatgagccataacaaccagttgaccaatcaacacagggcaagccctccaagcctggaggcacaccaatcatgagcctat

SEQ ID NO: 3763 - DNA, 462 bp, Cricetulus griseus; identical to SEQ ID NO: 121
  misc_feature (321)..(341): n is a, c, g, or t

SEQ ID NO: 3764 - DNA, 600 bp, Cricetulus griseus
cccggagctgtctctcaccgagrwccactgccctttggtgcagacagaaagaacaagtagcaactaaacaggagaagaatggctttgaagcagatttccagcaataggtgcttcggggggctccagaaagtttttgaacatgacagtgttgagctgaaatgtaaaatgagatttgctgtctacctaccaccacaagcagagagtggaaagtgtcctgcactctactggctgtctggtttaacttgcacagaacagaatttcatatccaagtctgrctttcagcaagctgcctcagaacatggccttgtcgtcattgctccagataccagcccccgtggctgcaatattaaaggagaagatgacagctgggactttggcactggtsctgggttttacgtgamtgccactgaagatccctggaaaactaattacagaatgtattcttacgtaactgaggagcttccacaacttataaatgccaatttcccagtggacccacasaggatgtctatttttggtcactccatgggaggccacggagctctgatttgtgctttgaaaaatcctggraaatacaaatccgtgtcagcatttgctcca

SEQ ID NO: 3765 - DNA, 582 bp, Cricetulus griseus; identical to SEQ ID NO: 123

SEQ ID NO: 3766 - DNA, 1045 bp, Cricetulus griseus; identical to SEQ ID NO: 124
  misc_feature (839)..(856): n is a, c, g, or t

SEQ ID NO: 3767 - DNA, 600 bp, Cricetulus griseus
tggcagagaagaggagatgggtttgagaagggattagaaggagaatagatgagataccagagtccaaggtcccagcaggactggtraaaggaacctgccgactcagcagggagaatgaagattgatcagctattaaatccttaktagaggtaggcttatgaagaaggrcagggaaatgggattgaggtrtakaaagcaggcrcaagactagktgcttgctatagaatctgtkgattccaacagcctgtstgaattcacttacgagctcaagaaggartgtstagcatcacgctattgtagcttttgacttggagctggtccargctgaaagccagctgcagcctctctcgtgtkcacatctccagaccatctcacctctgccctgctgtggggagcaggcatggcagtaaaagtggcctgggctctctctttcagttcattgtttgcttttctgggaattagaargtrggcaccaagatccatggcagcgttacttcttctgcatggkatgcggtgaacccctctgctggcttacacagtgattcaagataacaagtcaatagaaactgccgaggtgggacagagtggagccagggagcc

SEQ ID NO: 3768 - DNA, 579 bp, Cricetulus griseus; identical to SEQ ID NO: 126

SEQ ID NO: 3769 - DNA, 480 bp, Cricetulus griseus
  misc_feature (44)..(80): n is a, c, g, or t
  misc_feature (174)..(192): n is a, c, g, or t
  misc_feature (217)..(239): n is a, c, g, or t
  misc_feature (293)..(305): n is a, c, g, or t
  misc_feature (307)..(319): n is a, c, g, or t
aacggctgggtaacacrgaksgssaccaccccgcagttcccaannnnnnnnnnnnnnnnnnnnnnnnnnnnnnnnnnnnncatgtggaagctaaccagggacgagaccaactatggcataccacagcgtgcgcttcgaggkcactcccattttgtcagwgatgtcgktatctcnnnnnnnnnnnnnnnnnnnctctcakgctcctgggatggaacannnnnnnnnnnnnnnnnnnnnnngggcaccaccacgagacgatttgtaggccatactaaggatgtactgagtgtagnnnnnnnnnnnnncnnnnnnnnnnnnntgtctggatctcgagacaagaccataaagttatggaatactctcggtgtctgcaaatacactgtccaggatgagagtcattcagaatgggtgtcttgtgtccgcttctccccgaacagtagcaaccctatcatcgtctcctgtggatgggacaagctggtc

SEQ ID NO: 3770 - DNA, 906 bp, Cricetulus griseus; identical to SEQ ID NO: 128
  misc_feature (641)..(668): n is a, c, g, or t

SEQ ID NO: 3771 - DNA, 600 bp, Cricetulus griseus
gatggaactggaagaggggaaggcaggcagtggactccgccaatattatctgtctaagattgaagaactccagctgattgtaaatgataagagccagaatctccgaaggctgcaggcacagaggaacgagctaaatgcaaaagttcgcctactgcgggaagagctgsrgctgctacaggaacagggctcctatgttggagaagtagttcgggccatggataagaaaaaggtgttggtcaaggtccatcctgagggcaaatttgttgttgatgtggacaagaacatcgacatcaatgatgtgacgcccaattgccgagttgctctaaggaatgacagctacactctgcataagatcctacctaataaggtggaccctctggtgtcactaatgatggtggaaaaggtgccagactcaacttatgagatgattggtgggctggacaagcagattaaagagattaaagaagtaatcgagctgccggtgaagcaccctgaactctttgaagcactgggcattgcacagccaaagggagtgcttctgtatggacctccacgcactgggaagacattgttggcccgcgctgtagctcatcatacgga

SEQ ID NO: 3772 - DNA, 579 bp, Cricetulus griseus; identical to SEQ ID NO: 130
  misc_feature (184)..(203): n is a, c, g, or t
  misc_feature (477)..(495): n is a, c, g, or t
  misc_feature (529)..(529): n is a, c, g, or t

SEQ ID NO: 3773 - DNA, 591 bp, Cricetulus griseus
attgttgatgctgagtggaacattctctatgacaagctagagaagatccatcagtctggagccaaagtcatcttgtccaaactccccattggggatgtggctacccagtactttgctgatagggacatgttctgtgctggccgagtgcctgaggaggatctgaagaggacaatgatggcctgtggaggctcaatccagaccagtgtgaatgctctgattccagatgtgctgggccactgccaattgtttgaagagacccaaattggaggcgagaggtacaatttcttcactggctgccctaaggccaagacgtgtaccatcatcctccgtggaggcgctgaacagtttatggaggaaacagaacggtccttgcatgatgctatcatgatcgtgaggagggccatcaagaatgactctgtggtggctggtggtggggccattgagatggagctctccaaataccttcgggattactcaaggaccattccagggaaacagcagctgttgattggggcatatgccaaggccctggaaattattccacgacagctgtgtgacaacgctggctttgatgcccaaacatccttaaca

SEQ ID NO: 3774 - DNA, 581 bp, Cricetulus griseus; identical to SEQ ID NO: 132
  misc_feature (500)..(517): n is a, c, g, or t

SEQ ID NO: 3775 - DNA, 580 bp, Cricetulus griseus
ccgtacctaactcargagaagctgattgagtactgccaatccaaaggcatcgtggtgaccgcgtacagtccccttggctctcctgacaggccctgggccaagcctgaagacccttctctcttggaggatcccakgattaaggcratkgcrtccaagtacaataaaacaacagctcargtgctgatccggttccccatacaaaggaacttggtggtgatccccaagtccgtgacaccagcaagaattgctgagaacctgaaggtctttgacttcgagctgagcaaggaggatgtgaccactctactcagctacaacaggaactggagggtgtgtgccttgatgagctgtgctaaacacaaggattaccccttccacgcakaagyctgaagcttcggatgcctgctctctcccacgagacttgcacctgctcttcctgtwtcatctgtccttgtgggtgtastgtagactgtgtccctctrcactgtsyggaacctggaagatcagacawcgagggtctgttagtttgatgtagtctccacagagcattatcagtagctgagtgattttcttcagcctttct

SEQ ID NO: 3776 - DNA, 582 bp, Cricetulus griseus; identical to SEQ ID NO: 134

SEQ ID NO: 3777 - DNA, 600 bp, Cricetulus griseus
  misc_feature (80)..(104): n is a, c, g, or t
tcggcaagaataagcgcctgacgaaaggcggcaagaagggcgccaagaagaaagtggttgatccattttcgaagaaagannnnnnnnnnnnnnnnnnnnnnnnnatgttcaatattagaaacattgggaaaacactagtcacgaggactcaaggraccaaaattgcatctgmtggcctcaagggtcgtgtgtttgaagtgasccttgctgatctgcagaatgacgaagttgcatttagaaaattcaagctaattactgaggatgttcagggcaaaaactgtctgactaacttccatggcatggatcttacccgggacaagatgtgctccatggtcaaaaaktggcagactatgattgaagcccatgtggatgtcaagacgactgatggttatttgctccgtctgttctgtgttggttttactaaaaaacgcarcaaccagatacgcaagacctcctatgcacagcaccagcakgtccgccagatccgcmagaagatgatggamatcatgacccgagawgkacagacaaatgacttgarrgaagkggttaataagttgattccwgacagcwktggkraagacmtatgaaaggcttgccgcg

SEQ ID NO: 3778 - DNA, 600 bp, Cricetulus griseus
tcctgcgctgtgggttcggktgscckrgcwgawrygctttgagcacctgtggcctggccatcaactcatcatgttcctggcscgcctgacttcacagctggtcagggctgttccttgggcaggtttcagtcgttcctggcctgcctctggggtgatcggcagssatgcttttccacccctttacaatttgcagcctgcaagccaaagtcgggctgcctccctccctggtaagggggcccakttggagcttgaggagttcctggtccccaggaagatgtccatcagtccattagagagttggctkactgctcggtatctattgcccakactggatgttggggtcccaatgactgtgattccctcccaaatctamgagtgtccacccagccaggaggaggaagccaagcagggagtcagggaagtctgggatgccactgcagtgcagtgcaaaaatgtgctgaagatccgaagacggaagatgaaccaccacaaataccgcaaactggttaagaggacacgatttcatcggcgtatagtgccggaaggacggctgaaaaagaagcagattaagtttgagaacgatttttaccccatcttgct

SEQ ID NO: 3779 - DNA, 584 bp, Cricetulus griseus; identical to SEQ ID NO: 137

SEQ ID NO: 3780 - DNA, 569 bp, Cricetulus griseus; identical to SEQ ID NO: 138

SEQ ID NO: 3781 - DNA, 596 bp, Cricetulus griseus
  misc_feature (547)..(561): n is a, c, g, or t
gcaacatgccccctggcattgagcccagccctgacaaaatgcttcagggtcgcctttttgcttatccggacactcaccgccaccgcctggggcccaactatctccagatacctgtgaactgtccctatcgtgctcgagtggccaactaccagcgggatggccccatgtgcatgcacgacaatcagggtggtgctccaaactactaccccaacagcttcagcgcacctgagcagcagcgctcakccctggagcacaggtcccagtgctccacagatgtgcagcgcttcaacagtgctaatgaagacaacgtcactcargtgcggaatttctatacgaaggtgttaaatgaggaggagaggaaacgcctgtgtgagaacattgctggccacctgaaagatgctcagctgttcattcagaagaaagctgtcaagaatttcactgacgtccaccctgactacggggcccgcatycaggctcttttggammaatataatgccgagaaagcctaagaatgcgattcatacctatacgcaagcgggctctcacnnnnnnnnnnnnnnnaaagctaaccctggaagctcaagggctcaccctgg

SEQ ID NO: 3782 - DNA, 425 bp, Cricetulus griseus; identical to SEQ ID NO: 140

SEQ ID NO: 3783 - DNA, 593 bp, Cricetulus griseus; identical to SEQ ID NO: 141

SEQ ID NO: 3784 - DNA, 600 bp, Cricetulus griseus
ttgctcgcgaaccacagcytgcggacatggcgaaccaggtgatcagatgcaaggctgcagtcgcctgggaggccggaaagcctctctccatagaggaagtakaagtggcccctccaaaggctcatgaagttcgaattaagrtyattgccactgccgtctgccacaccgatgcctataccctgagtggagctgatcctgaggggtgtttcccggtgatcttgggacatgaaggtgctggaattgtggaaagtgttggtgaaggggtgactagggtgaaggcaggtgatactgtcatcccgctttacgtcccacaatgtggagaatgcaaattttgtctgaatcctaaaacaaacctttgccagaagataagagtgactcakgggaaagggttaatgcccgatggcacgaccagattcacctgcaaaggaaagcctcttttccatttcatgggaaccascacatytctctgagtacacagttgtggctgacatctctgttgctaaaattgacccttcggcacctttggataaagtatgccttctcggttgtggcgtttcaaccggctatgggtgctgctgtgaacactggcaaggtggagcc

SEQ ID NO: 3785 - DNA, 362 bp, Cricetulus griseus; identical to SEQ ID NO: 143
  misc_feature (308)..(308): n is a, c, g, or t

SEQ ID NO: 3786 - DNA, 585 bp, Cricetulus griseus; identical to SEQ ID NO: 144

SEQ ID NO: 3787 - DNA, 565 bp, Cricetulus griseus
accatattgcgggcaactggatttgatggtggaaataaagctgatcaattagattatgaaaattttcgacatgttgtacataagtggcattacaaactaaccaaggcatcggtgcattgccttgagacaggsgmatatactcatatcaggaatatattgattgtgctaacaaaaatacttccttggtacccaaaagttttgaatctgggtcargcyttggaaagaagagtgaataaaatatgccaagaagaaaaaagagaagaggccagatctatatgcattggctatggggtaacacaattatactttaatgtgatttatgagactagattacagaaggattctgaagatgtgaaaatgttttacaatgttgaagtcttatcttctgctttacttcaggagattatgggagattatgcgatcatgttcccacaggctggtgagagttgtcacttctgattatcaacttccggtctatactggatgatagtttcaaaggccacatataatatttcttgaaatggaaaaatgcaattttgtgcgtagttactatatcttgaggagc

SEQ ID NO: 3788 - DNA, 600 bp, Cricetulus griseus
ggttcagccacagttggcctwaagtcaaaaacacatgcagtgttggttgcattgaagagggcacagtcggaacttgcagctcaccagaagaaaattctccatgttgacaaccatattggtatctcaattgcgggtctgactgctgatgctagactgttatgtaattttatgcgccaggagtgtttggattccagatttgtatttgacagaccacttcctgtgtctcgtcttgtgtctctaattggaagcaagacccakatcccaacacagcggtatggccggagaccctatggtgttgggctgcttattgctggttatgatgatatgggccctcacattttccaaacctgtccatctgctaactactttgactgtagagctatgtctattggagcccgttctcaatcagctcgtacttacctggagagacatatgtctgaatttatggagtgcaatttagatgagctggttaaacatggtctgcgtgccttgagagaaacactccctgcagagcadgacctgaccacaaagaacgtttccattggaattgttggtaaagacttggagtttacaatctatgatgatgatgatgtgtctcca

SEQ ID NO: 3789 - DNA, 579 bp, Cricetulus griseus; identical to SEQ ID NO: 147

SEQ ID NO: 3790 - DNA, 507 bp, Cricetulus griseus; identical to SEQ ID NO: 148
  misc_feature (51)..(63): n is a, c, g, or t
  misc_feature (66)..(88): n is a, c, g, or t

SEQ ID NO: 3791 - DNA, 600 bp, Cricetulus griseus
  misc_feature (500)..(500): n is a, c, g, or t
aacaaccttagtgaccctttgctattctattaggagccagcctccagctgaatccccctaccacctctccccctacctccatgatagtctgagcattgtttargccctaaccctgggctttgtctctcagtgaatagaatttatacctattacatatccttcctctctaggccctagccctaaattctgtttgtcagtcagtagaactcattcatattgtaaaggtcacaggtgctttactacttggcaagggaatttcaatgtagctagccctgaaactttgttttgagaattgtcatgcggagactttccccaaagttctactatgtttaaatgtgtggaaatattaaaacacagcatcagattctagaagtcttaatccaagtctgaccaagcccgatgcacagagttttcattctgtctttccttggtccactttcctagcatacctacaggaatgcctcaacagatgtcagcaattttagaagagttttggccgnttgtatttctgtttaatattcaagaactggggacatactgtggatgtagtagagtataaaacttggaaaacacaggtgttgaaagaaaaataagtatctt

SEQ ID NO: 3792 - DNA, 320 bp, Cricetulus griseus; identical to SEQ ID NO: 150
  misc_feature (99)..(120): n is a, c, g, or t

SEQ ID NO: 3793 - DNA, 588 bp, Cricetulus griseus; identical to SEQ ID NO: 151

SEQ ID NO: 3794 - DNA, 700 bp, Cricetulus griseus; identical to SEQ ID NO: 152

SEQ ID NO: 3795 - DNA, 580 bp, Cricetulus griseus; identical to SEQ ID NO: 153

SEQ ID NO: 3796 - DNA, 600 bp, Cricetulus griseus
atgatatataaaaaccaccgcaatcctagttactattattggtctttcaattgcactagaactaaacaacctaacttataaccttaaactaaatcttcaatcaccacaaaacctattctcaacctctttaggatattttacacttatcatacaccgtttactaccaataaaatatctaacaataagctttaatacagccatagctacacttgatctgacatgattggaaaaagcaatcccaaaaactatctcactatctaattacaaagcatcacaagctatcacaaaccaaaaaggcctcattaaactatactttatatccttcttaatctccctagtatcaatcccaattttattatttaatttccacgagtaatctcaataataataaacacacccataagtwaagttcacccagaaacaaccattaatcaagctgagcagctatataatgctgctacaccagctccaccctcacctatcaaccccagttcatcaccatcataaatcactcatcctcccatatcattaaaattcaaaattaactctacaccctcataatatttagtaacaaacgtcatacctaactctataaaaaaa

SEQ ID NO: 3797 - DNA, 578 bp, Cricetulus griseus; identical to SEQ ID NO: 155
  misc_feature (509)..(509): n is a, c, g, or t

SEQ ID NO: 3798 - DNA, 580 bp, Cricetulus griseus; identical to SEQ ID NO: 156
  misc_feature (519)..(519): n is a, c, g, or t
  misc_feature (535)..(535): n is a, c, g, or t

SEQ ID NO: 3799 - DNA, 570 bp, Cricetulus griseus; identical to SEQ ID NO: 157

SEQ ID NO: 3800 - DNA, 579 bp, Cricetulus griseus; identical to SEQ ID NO: 158
  misc_feature (237)..(251): n is a, c, g, or t
  misc_feature (464)..(476): n is a, c, g, or t
  misc_feature (478)..(495): n is a, c, g, or t
  misc_feature (522)..(541): n is a, c, g, or t

SEQ ID NO: 3801 - DNA, 600 bp, Cricetulus griseus
agcatgaagattaatggaagaatttcagcatccacattctcttccgatagtaagcggatatatacgtcttctgggaatggagaagtttatgtgtgggatgtgaattcaaggaagtgcattaacagattttttgatgaaggcagtttgtatggattaagcattgctacgtcaaagaatgggcagtatgtggcttgtggttctaagagtggagtggtaaacatatacagtcaagattcttgcctccaacaaacaaacccaaagccaataaaagctataatgaacctggtcactggtgttacttccttggcattcaatcccactacagaaatattggcagtggcttcaagaaaaatgaaagaagctgtcagattggttcatcttccttcctgtacagtattttctaactttccagtttttaaaaagagtactgtttctcgtgttcaaaccatggatttttctcccagaagtggatacttcgccttggggaatgagcagggcaaggccctgttgtataggttacaccattactcagacttctaaagatgtttttcttgaaattcaattgaacccatgtcagtacatcttccccagaattttcaa

SEQ ID NO: 3802 - DNA, 587 bp, Cricetulus griseus; identical to SEQ ID NO: 160

SEQ ID NO: 3803 - DNA, 580 bp, Cricetulus griseus; identical to SEQ ID NO: 161
  misc_feature (167)..(184): n is a, c, g, or t

SEQ ID NO: 3804 - DNA, 583 bp, Cricetulus griseus; identical to SEQ ID NO: 162

SEQ ID NO: 3805 - DNA, 577 bp, Cricetulus griseus
  misc_feature (181)..(199): n is a, c, g, or t
  misc_feature (340)..(370): n is a, c, g, or t
ggggaatactggagactgctagagatcttttgcagtgtctgtggacctttcgagagtgaattattctcataatcagagccctgctttaatggagtaccttcaagggagggtcttcaacctcttgttaggtcctgtctcatcaagctgtgatgtcttcgttcctagatctctctggactggnnnnnnnnnnnnnnnnnnngggccaggaggacatctgaaagcttggaagcctgggagtgagttagatgcctttgggctattgtttggttgacagtggtaaagtcttccattagccctggcctaatgctttatgaaagagccaacggtggctgaaggtggnnnnnnnnnnnnnnnnnnnnnnnnnnnnnnngattcatacactgagtcatgggcttcacaggaaacagcaagggtaatgaacatgctcccatcacagtcctgtctgaatttatgttatcgtgtctggagggtgttcawggggtatacctggatcttgttgaaaatataagccatctatggtttctaatttggatggktttgttataaaggagctcagagygctcatttgaaagaattc

SEQ ID NO: 3806 - DNA, 584 bp, Cricetulus griseus; identical to SEQ ID NO: 164
  misc_feature (343)..(362): n is a, c, g, or t

SEQ ID NO: 3807 - DNA, 578 bp, Cricetulus griseus; identical to SEQ ID NO: 165

SEQ ID NO: 3808 - DNA, 600 bp, Cricetulus griseus
agmagaagcggaaacagctcaaaagggccaagatggccaargatcgcaagagccgcawgaagtcttcadaggcgaagaarggtaaagatscaaatgcccctaagakgcctatgtctgcatacatgttgtggcttaatgccmrccragagaagatcaagtsakaccatsctggsrtsarcmtcacagatctttctwagaargcaggcgagatctggaagggaatgtcccaagagaagaaagaggagtgggacccaaaggctgaggatgccaggagggaatatgaaaaagccctgaaagaatatgaaggaggaagaggtgaatcttctaaaagggacaagtctaagaagaaaaagaaagtaaaagcaaagatggaaaaaaaatccactccctctaggagttcatcatccaagtcttcatcaaggcagctaagtgagagcttcaagagcaaagaatttgtgtccagtgatgagagctcttcatgagagaacaagagcaaaaagaagatgaggcggagcgaggactctgaagaagaggaactagccagcactcctccaagctcagaggactctgcctcaggatctgatgagtagaggaagaaaa

SEQ ID NO: 3809 - DNA, 580 bp, Cricetulus griseus; identical to SEQ ID NO: 167

SEQ ID NO: 3810 - DNA, 579 bp, Cricetulus griseus; identical to SEQ ID NO: 168

SEQ ID NO: 3811 - DNA, 579 bp, Cricetulus griseus; identical to SEQ ID NO: 169

SEQ ID NO: 3812 - DNA, 579 bp, Cricetulus griseus; identical to SEQ ID NO: 170

SEQ ID NO: 3813 - DNA, 579 bp, Cricetulus griseus; identical to SEQ ID NO: 171
  misc_feature (89)..(103): n is a, c, g, or t

SEQ ID NO: 3814 - DNA, 579 bp, Cricetulus griseus; identical to SEQ ID NO: 172

SEQ ID NO: 3815 - DNA, 579 bp, Cricetulus griseus; identical to SEQ ID NO: 173

SEQ ID NO: 3816 - DNA, 580 bp, Cricetulus griseus; identical to SEQ ID NO: 174

SEQ ID NO: 3817 - DNA, 533 bp, Cricetulus griseus; identical to SEQ ID NO: 175

SEQ ID NO: 3818 - DNA, 579 bp, Cricetulus griseus; identical to SEQ ID NO: 176

SEQ ID NO: 3819 - DNA, 580 bp, Cricetulus griseus; identical to SEQ ID NO: 177

SEQ ID NO: 3820 - DNA, 633 bp, Cricetulus griseus; identical to SEQ ID NO: 178

SEQ ID NO: 3821 - DNA, 589 bp, Cricetulus griseus; identical to SEQ ID NO: 179
  misc_feature (109)..(109): n is a, c, g, or t

SEQ ID NO: 3822 - DNA, 542 bp, Cricetulus griseus
ttgacttttttgaagacattgattcagatgaagatgagggagggctgtttggacgtcagaagattaagtcaagcaaaagttccaggaatctgaaatacaaagatttcttcaatccagttgaaagtgatgatgacatcgctagtgtcgtttatgatgacttadgttctaacaaagaggaagaatttgctgargaagcagaagaaagcatttctgaaatggatgaagataacgacctggaakaaagtgagggtggcgagcaacttaaagaargctcgaaaagagtaaccttcgctttgccagaggatgaggctgaagacacgagtcccttagctgtaaagcaagaatctgatgaagttaaatcctcttttgaaaagagacaggagaagatgaatgagaaaattgcatctttggaaaaagaattgttggagaaaaagccttggcagcttcaaggggaagtgacagcacasaagcggccagaaaacagcctgctggaagagacactccactttgaccatgctgtcagaatggcacctgtaatcaca

SEQ ID NO: 3823 - DNA, 579 bp, Cricetulus griseus; identical to SEQ ID NO: 181

SEQ ID NO: 3824 - DNA, 600 bp, Cricetulus griseus
ggggtgtgctggcggctggcggagtgagactttggcagacatggctcccagctcgctggctcccgaacccgagagtcggaagggtatccgggcggtgctgctggggccgcccggggctggcaaggggacccaggcacccagattggctgaaaacttctgtgtctgccatttggccactggggacatgctgagagccatggtagcttcaggttctgagctggggaaaaagctgawggccacgatggatgctgggaaactggtgagtgatgaaatggtcgtggagctcattgagaagaatttggagagtccttcatgcagaaacggctttcttctagatggcttccctcggactgtgaggcaggctgaaatgcttgatgacctcatggagaagaggaaagagaagcttgattcggtgattgaattcagcattccagactccctgctgatccggaggatcactggaaggttgattcaccccaatagtggccggtcgtaccatgaggagttcaaccctccaaaggagcccatgaaggatgacatcactggagagcccctgatccgaagatcagatgacattgagaaggccttgaagatccgcct

SEQ ID NO: 3825 - DNA, 600 bp, Cricetulus griseus
tacaacaggaacttggcaggccgcaatgacgcaaaccctgagacccatgcttttgtsacatccccagagattgtcacagccctggccattgcaggaacccttaagttcaacccadaaaycgacttsttgacaggcaaggatggcaagaagttcaagctggaagctccagatgcagatgagcttccccgatcagactttgacccakggcaggacacctaccadcaaccccccaakgacagcagtgggcarygggtakacgtgagccctaycarccagcgcctgcarctcttggagccttttgacaagygggacggcaaagacctggaggacctgcaaatcctcatcaaggtcaaagggaagtgcaccaccgaccacatttctgctgctggcccctggctcaagttccgtggacatctggacaacatctctaatracctgctcattggtgccatcaacattgaaaacggcaaggccaactccgtgcgtaatgctgtcacccaggagtttggccctgtgcctgacactgctcgatactacaagaaacatggcatcaggtgggtggtgattggagacgagaactatggtgaaggctcaagccgg

SEQ ID NO: 3826 - DNA, 518 bp, Cricetulus griseus; identical to SEQ ID NO: 184
  misc_feature (173)..(201): n is a, c, g, or t

SEQ ID NO: 3827 - DNA, 535 bp, Cricetulus griseus; identical to SEQ ID NO: 185
  misc_feature (467)..(481): n is a, c, g, or t

SEQ ID NO: 3828 - DNA, 600 bp, Cricetulus griseus
  misc_feature (335)..(360): n is a, c, g, or t
  misc_feature (435)..(456): n is a, c, g, or t
tttcttgatcatggatggtgaagatataccagacttttcaagtttaaaggaagaaactgcttattggaaggaactttccttgaagtataagcaaagcttccaggaagctcgggatgagctagttgaattccaggaaggaagcagagaattagaagcagagttggaggcacagttagtacaggctgaacaaagaaatagagacctgcaagctgataaccaaagactgaaatatgaagtggaggcattaaaggagaaactagagcatcagtatgcacagagctacaagcaggtctcagtgttagaagatgacttaagtcagacccgggccattaaknnnnnnnnnnnnnnnnnnnnnnnnnngctggagcaggccaatgatgacctggagagagcaaaaagggcaacaatagtttcactggaagattttgaacaaannnnnnnnnnnnnnnnnnnnnnaaatgcatttttagaaagtgaacttgatgaaaaggaatctttgttggtctcagtacaaaggttaaaggatgaagcaagagatttatagcaagagctagcagttcgggaacgacaacaggaagtgacccgcaaatctgctcctag

SEQ ID NO: 3829 - DNA, 581 bp, Cricetulus griseus; identical to SEQ ID NO: 187

SEQ ID NO: 3830 - DNA, 600 bp, Cricetulus griseus
aacatgctaagcattaggagattcctaacagtcccttaattaccagacagcctgtgagaggacaaaggctgaccatccacctgtgckgagtagctagctccttctagaagggatagcgtttagaagttgctttggtttgaactgtccccaggatgccacagaagagcagggcacatcttggaggcggctagggcaagttgtgtgcctaccaagatagactcccctakcagctagacaggctgggagtatatgtagctgtcctggatccccttctgttgctagcaggataagtgaccactcagagggagcttaatagttttcttatagtctagctctttgggggacctaccattctgtgccttgagagctgtaggaccaacagactaagatyggatggctytcacaaagagagcagatgagcttyctctacgygggtgggctgtggggacaggactgggaggatcacactcgtaccttatgtcctgtaaattctgattctctattccaagagggtataccggaggtgcggaaactggaggtagcaatattaattcttaagtatgcacctgactttctatccccatagggttcctctgttgc

SEQ ID NO: 3831 - DNA, 538 bp, Cricetulus griseus; identical to SEQ ID NO: 189

SEQ ID NO: 3832 - DNA, 580 bp, Cricetulus griseus
  misc_feature (394)..(414): n is a, c, g, or t
gtccattattaatcagagagggaaaattggacccttgatgatacaaagctaccaagtggtgaagctgaaactgattaggcgcagccttctaactaataatggactgtgattgctagtaaaaatctcccgcggcatttattaaatggacaattcctgggcagtaactgtggagattctgagtgggtctargatgtagccacggatttatttttagcagataggtgggttttgtaagggaaattcatgaaatgttactattaacagtcatggtggaccttcgcaactatttatatttggttattttatttgtactggtttgctgtttaaaattctttccaggtgtargtggcaaatgcttttaatcccagcactcatgagacagagtcaggcagcnnnnnnnnnnnnnnnnnnnnncttggactacagagcaagtgccaggattggctccaaagctacacatagaaaccctgtcmcaaaacamacawtaaatcagagcatatttcttatgcttttccctataacctgtaagcgccatacataattaacttattgaagcttctgtaacccttacactgggaca

SEQ ID NO: 3833 - DNA, 598 bp, Cricetulus griseus
  misc_feature (109)..(128): n is a, c, g, or t
atatttgacattgatgaagctgaagaaggtgtaaaggatcttaagattgaaagtgatgctccagagccagctgagccagaggatgacctggatattatgcttggcaatnnnnnnnnnnnnnnnnnnnntgtcaaattcccagatgaagatgaaatactagaaaaagacgaagctttagaagatgaagacagcaaaaaagacgatggcatttcattcagtaaccagactgggcctgcttgggcaggctcagaaagagactatacatatgaggagttgctgaaccgagtgttcaacatcatgagagaaaagaatccggatatggttgctggagagaagaggaaatttgttatgaaacctccacaggttgtccgagtaggaaccaagaaaacttcttttgtcaattttacagatatctgtaaactattacatcgtcaacccaaacatctcctcgcatttttattggcagaattgggtacaagtggttctatagatggtaataaccagcttgtaatcaaaggaagattccaacagaaacaaatagaaaatgtcttgagaagatatatcaaggaatacgtcatttgtcacacatgccgatcac

SEQ ID NO: 3834 - DNA, 600 bp, Cricetulus griseus
  misc_feature (447)..(461): n is a, c, g, or t
gatgaaaagaggcagttaagcctggatatcaataagttacccggggagaagctaggtcgagttgtacatatcatccaagccagggagccctctttacgtgattcaaacccagaagaaattgagattgactttgaaacactcaagccatccacacttagggagcttgagcgatacgttttatcctgccttcgaaagaaaccccggaagccctacaccattaagaaacctgtggggaagacaaaggaggagctagccctggagaagaagcgggaactagaaaagcggttgcaagacgtcagtggacagcttaactccaccaaaaaacctcccaagaaagcgaacgagaaaacagagacgtcgtctacgcagcaagtggcagtgtctcggctcatcgcttccagctccagctcagattccagctcctcgtcctcgtcttcatcttcttcnnnnnnnnnnnnnnnggactcgggctaaggggccaggccagatgggaaaggaaggctcggcaggaccggacccctgtaccacccttccccaccacttccccttgctgtgacacttctgcatctcatccctccataggagagctggctctgcagg

SEQ ID NO: 3835 - DNA, 522 bp, Cricetulus griseus
aatgctttccakttacacackaactgaaaactgtgtaagatttcctttgtgcactgtgtgctctgtgagagggcctgtcaagcakagcagaraggaggcaaggctgatccasgctgcttctctgcaagctgastcaaagcatgagatacattattccaactcagatgtatttggacactcatcatacatcakacctaatgagatctastakatggatatgtgtggtatgcaaattagaggccttctcatcctctggaaatattasagtasaggasaatgggtaaaaccaaatatgctctaactcaatcagttagacatattcatgaagggaatggtaagtacggscagcttacttagtgtggggcatctcctawgtctgagaactcaagcccatcaattagtcacccacaaaagtaaccagagcattggaagaactgttaataccagagtccttagtaggtagcataaaacattatgcactacttggagttgttatgtaaaattctatcttcagggtccctc

SEQ ID NO: 3836 - DNA, 271 bp, Cricetulus griseus; identical to SEQ ID NO: 194

SEQ ID NO: 3837 - DNA, 520 bp, Cricetulus griseus; identical to SEQ ID NO: 195
  misc_feature (226)..(240): n is a, c, g, or t

SEQ ID NO: 3838 - DNA, 582 bp, Cricetulus griseus; identical to SEQ ID NO: 196

SEQ ID NO: 3839 - DNA, 519 bp, Cricetulus griseus; identical to SEQ ID NO: 197

SEQ ID NO: 3840 - DNA, 600 bp, Cricetulus griseus
actactaaagtgtgtagaagctgagattgcaaactatgaggcttgtctcaaggaggaggtggagaaaaggaagaagttcaagattgatgaccagcgaaggactcacaactacgacgagtttrtstgtaccttcatatctatgctggctcaggaaggtatgcttgccaacctagtggaacagaacatctcaktgcggcgccgccaaggggtcagcattggtcggcttcacaagcagcggaagcctgaccgacggaaacgctctcgcccctataaggccaaacgccagtgaggacctctggccctgattctgcagcctctcttgccacaaggctcttaccaagtcccctccctatcccacttttttccccccagtattactgaatagttcagctagatcccakgccctgggagtgggaataagctgtgtgtcctgctttattatgctctggggcctggcaggggtaagtcagccccataatgctcaggaagcagcagttagaattggagggtgctgtggcctccacaaccatctatggaacagcagtacctggccttgttgcctgggcagcagaatatacattttacctactggagatgtct

SEQ ID NO: 3841 - DNA, 600 bp, Cricetulus griseus
cctctgtctttgagaaatactttcagttgcaagaagagggcaaggaaggagagaacagagcggtcatccattaccgggacgatgagaccatgtatgttgaatctaaaaaagacagagtcacagtagtcttcakcacggtgtttaaggatgacgacgatgtggtcatcggaaaggtcttcatgcaggaattcaaagaaggackaakagccagccacacagccccccaggtcctttttagtcacagggaacctcctctagagctgaaagacacagatgctgccgtgggtgacaacattggctacatcacctttgtgctcttccctcgccataccaatgccactgctygakacaacaccatcaacctgatycacacgttccgggactatctgcactaccacattaagtgctctaaggcctatattcatacacgaatgcgagcaaaaacatctgacttccttaaggtgctcaaccgtgcacgcccagatgccgagaaaaaagaaatgaaaacaatcacggggaagacattttcatcccgctaacgcttgggaactgaggaggaagcgctgttgatggaaggctggaccgcttgctactggataa

SEQ ID NO: 3842 - DNA, 600 bp, Cricetulus griseus
aaggatgaaggcagagatggacgaacagataaaggctgttgagagagcaagcgaggaggagcgtctccgtcttcagcaggaactgagtcgggtgagacagkmgrccswcrrcrkgrkgaaaaccycasaaraacaacttgctgaacttcasaggctgcmtgccarrggagctggccascagagagcaggaactggccagaaagctccasacccgagagagggagctgcmtgascaratgaaaatagctcttgaaaaaagtcaatcagaatatttgaagctcatccaagaaaaagagcagcaagattccttggctctagaagagwtagagctgcagaaaaaagcaatcctttcagagagtgaaaataaactccaggaacttgggcgagaagcagaggtttaccgaactagaatacttgaattggaaacctccttggaaaaaagcttacaagaaagcaaaactcagtcagagcatttagctgtccatctggaagctgagaagaataagcacagtaaagagctcacagccatgactgagaagcacagggcagagctggagcgtctccagcagcagcaggacagcctgtgggctgagagactcc

SEQ ID NO: 3843 - DNA, 593 bp, Cricetulus griseus; identical to SEQ ID NO: 201

SEQ ID NO: 3844 - DNA, 232 bp, Cricetulus griseus; identical to SEQ ID NO: 202

SEQ ID NO: 3845 - DNA, 592 bp, Cricetulus griseus; identical to SEQ ID NO: 203

SEQ ID NO: 3846 - DNA, 486 bp, Cricetulus griseus; identical to SEQ ID NO: 204

SEQ ID NO: 3847 - DNA, 599 bp, Cricetulus griseus
  misc_feature (491)..(528): n is a, c, g, or t
  misc_feature (534)..(534): n is a, c, g, or t
ttggtttggggcaccatttctttgccgcggtttgtcctgtctaatgtctgtcctgtctaatgtctcsrtgtctcatatttgtggcatgcatgggtcargrktcttttcttgttgccctawkcacatggyacgggaaaggagttctgccatgtgtyacgggttakaatgtgktatgttggartcccccgaggctgcttttctgaactcgraccactgytgcagcccttacagctgakcctggcccrtrtwggtgagtctttccctatccccacttgccggtcccgtgggtccctgccatttgcctagctgcccgrcattctttgtgctctacacacatggtatgyaggggggcygyawgagtctttttcccacmcctggattggccwagggtctgggkttaccagcagcacccctaccccaggtctctctgccttgagcacayggrgswcgagcgtatgaacttatctggcytgakggttaawtgsccytannnnnnnnnnnnnnnnnnnnnnnnnnnnnnnnnnnnnnggttcncgcccccacaatttgccacctttttttttccccacttttccctatgttttccattaacacttttt

SEQ ID NO: 3848 - DNA, 558 bp, Cricetulus griseus; identical to SEQ ID NO: 206

SEQ ID NO: 3849 - DNA, 539 bp, Cricetulus griseus
  misc_feature (143)..(157): n is a, c, g, or t
ggaagaagctgactaaakaaccagccaaagccttaaattgtgcaaaacatactgttgctatgatgtaactgcatttgacctaaccactgcgaaaattcattccgctgtaacgtttttcacatatttaaagcagaagcacgtcnnnnnnnnnnnnnnntgcataaggtttttgtagtgtgatgtcttaatcatagtctaccatcaaatactttaggagtatccttaatgttkagatagaatattagcagcatgcaataattacatcctaagttctcaagcagaggcagtctattgcaaggaccttctttgctgccagttaccataggctgttttaagttagaaaactgaatagcaacactgaatactgtagagatgcactttgctcagtaatacttgagttgttgcaatatttgattatccatttggttgttacagaaaaattcttaactgtaattgatggttgttgccgtaatagtatattgcctgtatttctacctctagtaatgggctttatgtgctagattttaatatccttgagc

SEQ ID NO: 3850 - DNA, 588 bp, Cricetulus griseus
atccaccagcaagagagggcgccagtgaaaggcatcctctataagataagtcttataaaatatatagatttgtgataattaagactgagctaacagatgagaaatcctagtctttggccaagcatatttgtacctaatataagtgtctgtgtattatttggggccctaacttgtcgggcagactcgggtggctggtgtaaagcacccacgtggcagtagggctgcagtggcttttagcagaaagatttatggtaacagaatggtgtcagtgagcgggatgaccccatgccccaaggttcccagaggaagaggaaaacctgctgccacagccggcccttttgggctgctgagaggcatatgctcgcgccatcatggagttcatggaggttggactcggcactcccaagatgataaagacagatccagataaagaaaaacatctaaaggtttacactacatttaaaaatatctgtaggcttgtgagagaaaaaataacaggagaaaatagagtagttgggtgtggtggcagacacctttaatctccagactccaaakggagaggcaatcggatttccacagagaaaccct

SEQ ID NO: 3851 - DNA, 579 bp, Cricetulus griseus; identical to SEQ ID NO: 209

SEQ ID NO: 3852 - DNA, 587 bp, Cricetulus griseus
gaaaatgaacagggcaatctgagagaagttacagctgtgtatgatcgtattcttggtattccaacgcagctctacagtcatcatttccagagatttaaagaacatgtacagaataacttgcctagagatcttttaactgaggaacagttcattcaactgagaagggaattagcttctgtaaatggacacagtggtgatgatggacctcctggtgatgaccttccatcaggaattgaagacataactgatccagcaaagctaattactgaaatagaaaacatgagacacagaatcattgaaattcatcaagaaatgtttaactataatgagcatgaagktagtaagaggtggacatttgaagaaggtattaaaagaccatattttcatgtgaaaccattggaaaaggcccaactaaagaactggaaagaatacttagaattcgaaattgaaaatggaactcatgaaagagttgtggttctctttgaaagatgtgtcatatcttgtgccctctatgaggagttttggattaagtatgccaagtacatggaaaaccatagcattgaaggagtgaggcatgtcttcagcag

SEQ ID NO: 3853 - DNA, 583 bp, Cricetulus griseus; identical to SEQ ID NO: 211

SEQ ID NO: 3854 - DNA, 596 bp, Cricetulus griseus
  misc_feature (383)..(404): n is a, c, g, or t
ggcggttctcttaaagctgggagtcctctgcagtggccaaggaggccgagctctgttgctccgaagccgggtggtcaaacctgcttatgtctcagcgtttctccaggaccagcctaccccaggatggcatggcacacagcacattcacctgtcaccaagctaccattctggttccaaggctgcatctctccattggactagtgagagggctgtcagtgttttgctcttgggcctgcttccagctgggtacctgaatccctgctctgtggtggactactccctggctgctgccctcaccctgcacggtcactggggccttggacaagtggtgactgactacattcatggggatatatcgaagaargctgtcaaggcaggcctcnnnnnnnnnnnnnnnnnnnnnnttgctgggctttgctatttcaactaccacgatgtgggcatctgcagagcagttgccatgctgtggaagctctgacctctgcagtgcaacaccttggattgtatgccactttgcctctgctctgtctatgccgttcagctcccagtgagcagggcgtggagaagtcccatggtgtcagaatttcttctaatta

SEQ ID NO: 3855 - DNA, 600 bp, Cricetulus griseus
  misc_feature (73)..(90): n is a, c, g, or t
ctcgtgtccgcggtgccgttactcgcagtcgggcggcggctgaggctcagcgcagagcgcaggtagcgggttnnnnnnnnnnnnnnnnnncgcggaggcacctcggcggtcagagcccctgcgctagtgcagccaccttcgcctgctccgcgcttccttccttcgctcgcaccatggctgatcagctgactgaagaacagattgctgaattcaaggaagctttctccctattcgataaagatggtgatggcaccatcaccacaaaggaacttgggactgtcatgcggtcactgggtcagaacccaacagaagctgaattgcaggatatgatcaacgaagtggatgccgatgggaatggcaccattgacttcccagagttcttgaccatgatggctagaaaaatgaaagatacagatagcgaagaggaaatccgcgaggcattccgagtttttgacaaggatgggaatggttacatcagcgcagcagaactgcgccatgtcatgacaaacttaggagaaaaactaacagatgaagaagtagatgaaatgatcagagaagcagatattgatggagacggacaagtcaactatgaagaattcg

SEQ ID NO: 3856 - DNA, 600 bp, Cricetulus griseus; identical to SEQ ID NO: 214
  misc_feature (183)..(201): n is a, c, g, or t

SEQ ID NO: 3857 - DNA, 589 bp, Cricetulus griseus; identical to SEQ ID NO: 215

SEQ ID NO: 3858 - DNA, 600 bp, Cricetulus griseus
tcccggcgcggcttgtgagggattatccactgcgctgarttcgtcggaaccatggcgtccctttccctggcrcytgygwatatcttcaaggctggagctgatgaagagagagccgaaacagctcgcctgtcatcctttattggtgccatcgccattggagaskkggkgaagagcactttggggcccaagggcatggacaaaattcttctaagcagtggacgakatgcctctctaatggtaaccaatgatggygccaccattctaaaaaacattggtgttgacaacccakcagctaaagttttagttgatatgycaagggttcaagatgatgaagtkggtgatggcactacctctgytactgttttggcagcagaactactccgkgaagcasaatctttaattgcraaaaasatacmtccacagaccatcattkcargttggagagaakccaccmwrgcagcawgagakgcgctgktkacctcygctgttgatyacggttacgmtgamgkcaaattccggsmwkattkaatgawmattgymggaacgacwttatcctcaaaactycttaytcatcatarggaccmctttacsgarttagct

SEQ ID NO: 3859 - DNA, 600 bp, Cricetulus griseus
gctgaggaatgttcaagcagaggaaatggtagagttttcttcaggcttaaagggtatgtccctgaacttggaacctgacaatgttggagttgtcgtgttcggaaatgataaactgattaaagaaggcgacattgtgaagagaacgggtgccattgtggacgttccagttggcgaggagctgttgggccgtgtagttgatgcccttggtaatgccattgatgggaagggtccaattggttccaagacccgtagacgagtgggcctgaaagcccctggaatcattccccgaatctcagtgcgggaaccaatgcagactggcattaaggctgtggatagcctggtgccaattggtcgtggtcagcgtgagctgattattggtgacagacagactgggaaaacatcgattgctattgacacaatcatcaaccagaaacgtttcaatgatgggactgacgaaaagaagaagctgtactgtatctacgttgctattggtcagaaacggtccactgtcgcccagttggtgaagagactgacagatgcagatgccatgaagtacaccattgtggtgtcagctacggcttctgatgctgccccacttca

SEQ ID NO: 3860 - DNA, 389 bp, Cricetulus griseus; identical to SEQ ID NO: 218

SEQ ID NO: 3861 - DNA, 700 bp, Cricetulus griseus; identical to SEQ ID NO: 219

SEQ ID NO: 3862 - DNA, 586 bp, Cricetulus griseus; identical to SEQ ID NO: 220

SEQ ID NO: 3863 - DNA, 591 bp, Cricetulus griseus; identical to SEQ ID NO: 221

SEQ ID NO: 3864 - DNA, 600 bp, Cricetulus griseus
caggactgctgagctacctggtgttcaacatcatccccaccctggctgacatcattattggcatcatctacttcagcatgttcttcaatgcctggtttggcctcattgtgttcctgtgcatgagtctttacctcatcctgactattgtggtcacggasyggagakccaastttcsccgygatatgawcacacagtgaaaatgtcaccaakgcacgagcagtggactcgctgctcaactttgakacggtgaaatactacaatgctgagggttatgaagtagaccgctacagagaggccatcgtcaagtatcagggtttggagtggaagtcaaatgcttcactggttgtattgaatcagacccagaacttggtgattgggcttgggctcctggctggctccttactttgtgcatacttcgtcagtgagcagaagctgcaggttggggactttgtgctttttggcacttacatcactcaactgtacatgcctctcaactggtttggcacctactacaggatgatccagactaatttcattgacatggagaacatgtttgacttgctgaaagaggaaacggaagtaaaggatgttcctggagca

SEQ ID NO: 3865 - DNA, 555 bp, Cricetulus griseus; identical to SEQ ID NO: 223

SEQ ID NO: 3866 - DNA, 567 bp, Cricetulus griseus; identical to SEQ ID NO: 224

SEQ ID NO: 3867 - DNA, 600 bp, Cricetulus griseus
ggtaccttcttcatggtttggaatgtgtggtagcaatgcatcaagctcagctgatctccaagataccacatattttgaaggagatgtatgatgcagatcttttagaagaagaggtcatcatcagctggtcagaaaaggcctctaagaaatatgtctcaaaagaacttgccaaagagattcgcgtcaaagcagaaccatttattaaatggttgaaggaagcagaggaagaatcttctggkggtgaggaagaaatgaagatgaaaatattgaggtggtatattcgaagactgccagtgtaccaaaagttgaaactgtgaagtctgacaacaaggatgacgacattgatattgatgccatttaaaggatggatgcaacttagcttaacagtataatgctgcaaatttttctccattatcagccagaagtgcaacatgtatgtgcaaaagctaaaatggcttaacatcatgctacacttgatactaaaaagctattactgtgagtggtctataattaagcccaatgagacatctagggagtccatacatatcagtgagcagttgtagtttgcttatttatagcatgtttcttttggaaaaacta

SEQ ID NO: 3868 - DNA, 600 bp, Cricetulus griseus
tgttagtgactggaaggagcatacaaagtataaaaatggctacagcgtaaaccaccaggtcatccattggttctggaaggctgttttaatgatggatgcagaaaaaagaatacgcttgcttcaatttgttaccggcacatcccgtgtgcctatgaatggatttgctgaactctatggctcgaatggaccacagtccttcacagttgaacagtggggcacccctgataagctgccaagagcacatacctgctttaatcgcctggacctgccaccctacgaatcgtttgacgaactctgggataaacttcagatggcgattgaaaacactcagggctttgatggggtcgattagattacaagtaacaagctgtggtgtcttaaacaccatagtttttaagcaaaagcaaaattgcatcttaacattttccagagtacttctataagatagtcactggctcttccccgagagaccagagtacacagttcatccaaggtttcagccaccaccatactgaagtgttcatttgtccagttactttgtcctttcattggggttcacacgacagggcatttaagtcctgtgtgcctggctgtatctca

SEQ ID NO: 3869 - DNA, 600 bp, Cricetulus griseus
ataggaaaggggatagaagagacagggatcgggaaagagagaaagagaacgagaggggtcgaagacgagatagagattatgataaagaaagaggcagtgatcgagaaagggacagggagagatcaagagagcggtccaaggagcagcgaagtagaggtgagggagaggaaaaaaagcacaaagaagacaaggaggataggcgacacagagacgacaaaaaagaattcaagaaaaaacacagcagaagtagaagcagagaaaggaaacacagaagtagaagcagaagcaaaaatgcagggaagcggagcaggagcaggagcaaagacaagtcaagcaaacataaaaatgaaagcaaagaaaagtcaaacaaaagaagtagaagtggcagtcaaggaagaactggcagtgttgaaaaattgaggaaacgagaacacagccctagcaaagagaagtctagaaagcgcagcagaagccaagaccgctcccacaagagagatcatggggatggcaaggaccagtcagacagacaggatcatcagagaagccagagtgtagagccagagagccaagaaaaagaacataaaaacaaagatgagacta

SEQ ID NO: 3870 - DNA, 600 bp, Cricetulus griseus
  misc_feature (409)..(450): n is a, c, g, or t
attcaggaggatgtgcttaggcttctgacactgtgtgtcagaacggcactatttcagtttatagccctctcatacatagtacagtagttgattaaaaaacaaaaccagtaaaatggcatttgcctcacagttattaactatcaatctggctagatcttcatgcagtaacctaaatgtgatatattgggtgtgagagaactgtgttggggtttttagattttcgacactagtttgcctctttaattttcacaacccyttattagcaagttccttttatatataggccctaaaattgggatagttaaaatatggttgttaattatgattagcctttggtgaaaataggtttaaagtctgttttgattccaatgtttctcccaaagaattctgtgttaaatatacaccaagnnnnnnnnnnnnnnnnnnnnnnnnnnnnnnnnnnnnnnnnnncctggaaataggagtaagtttgtatgttattgtkgatagagcaactcaggtaatttccatttctggttttctattctctgkgtaractacctgggkgtcactttctarccagcaaggggcttcactgctgtctagatgtctttcataatg

SEQ ID NO: 3871 - DNA, 592 bp, Cricetulus griseus; identical to SEQ ID NO: 229

SEQ ID NO: 3872 - DNA, 600 bp, Cricetulus griseus
cagctgtgtgaggacaaccacgaggaagactattttctgtatgtggcctacagtgacgaaagtgtctatgggaaatgaggcagaagcccagcagatgggagcacctggacttgggggtaggggtggggtgcttgtgggactcggggaaccagatggagggctcccaaccatggaggagacgcaaggtgaagaacatcggaaaacatcacaccgcacacactgtcttctgttttttcacaagctcaatcgttagttttctctgcttcctcagcccasgaagatcttgtgttggcttgactgtgagagcagggtgggtactttgttactcacagctttgctctgaattttcctgcagtttcatcagacggttgggaggagggcaggtggccactcgagaggaatacagttcagcagcaactcctgtctctttgggcagaggtttaatttttggcatttgcacaaaatgccaaaatttgcacatagggaaagggggaaaatgctttaggagctgtaggggaccatacctaagggaccaaaaaattcccactgtcattgaagcattgtgacccctgacctctgtctccaattcctccctctcca

SEQ ID NO: 3873 - DNA, 584 bp, Cricetulus griseus; identical to SEQ ID NO: 231

SEQ ID NO: 3874 - DNA, 600 bp, Cricetulus griseus
catggawtgacatcaaaaaggtctatgcctctcagagaatgagagcgggcaaaggcaaaatgagaaaccgaagacggatccagcgcaggggaccctgcatcatctatmatgaggataatggtatcatcawrgycttcagraacatccctggtattactctgctcaatgtgagcaaactgaacattttgaaacttgctcctggtggacatgtgggacgtttctgcatctggaccgagggtgccttccgaaagttagatgarttgtatgggacttggcgtaaggctgcttccctgaaaagtaattacaaccttcccatgcacaagatgatgaacacmgacctaagcaggatcctaaaaagcccakagatccaaagagccctccgagcaccacgcaagaagattcatcgtagagtcttgaaaaagaacccactgaaaaacctgagaataatgttgaagctcaacccgtatgcaaagactatgaggaggaataccattcttcgccaggccagaaatcacaaactgcgggtgaagaaactagaagcagcagcagcagcgctagcagcaaaatcagagaaaggggcagcagatcagaagtcagtag

SEQ ID NO: 3875 - DNA, 579 bp, Cricetulus griseus; identical to SEQ ID NO: 233

SEQ ID NO: 3876 - DNA, 580 bp, Cricetulus griseus; identical to SEQ ID NO: 234
  misc_feature (496)..(540): n is a, c, g, or t

SEQ ID NO: 3877 - DNA, 574 bp, Cricetulus griseus; identical to SEQ ID NO: 235

SEQ ID NO: 3878 - DNA, 600 bp, Cricetulus griseus
caactacacagaattattggattgacatccacttackatggggagactatgatycccatgatatcgagcgctatgcccgggccaagttcctgggattataccacagacaacatgagtrkskacccttctcccacakgtgtgctcattgccattgacctggcctatwatctacacagtgcctatggaaactggtttccasgcagmaagcctcttatacagcaggctatggccaaratcatgaaggcaaatcctgccttgtatgtattacgygaacggatscgcwaaggactgcagttgtattcatctgagcccactgagccttatctgtcctctcagaactatggtgaactcttctctaaccagattatctggtttgtggatgacaccaatgtctatagagtgaccatccacaagacctttgaggggaacttgacaaccaaacccatcaacggagccatcttcatctttaacccacgtacggggcagcttttcctcaagataatccatacatctgtgtgggctggacagaagcgtttgggtcagttggccaagtggaagacagctgaggaagtggctgccctgattcgatctctgcctgta

SEQ ID NO: 3879 - DNA, 557 bp, Cricetulus griseus; identical to SEQ ID NO: 237

SEQ ID NO: 3880 - DNA, 503 bp, Cricetulus griseus; identical to SEQ ID NO: 238
  misc_feature (69)..(90): n is a, c, g, or t
  misc_feature (381)..(393): n is a, c, g, or t
  misc_feature (395)..(417): n is a, c, g, or t
  misc_feature (429)..(458): n is a, c, g, or t

SEQ ID NO: 3881 - DNA, 536 bp, Cricetulus griseus; identical to SEQ ID NO: 239
  misc_feature (121)..(184): n is a, c, g, or t
  misc_feature (420)..(494): n is a, c, g, or t

SEQ ID NO: 3882 - DNA, 600 bp, Cricetulus griseus
gggtgtgccgaagaatagcaactggatcttttctcaaaaggaaccctggtgtaaaggaagggtataaattttacccaccaaaagtagagatgttcttcaaggatgatgccaataatgacccgcagtggtctgaggagcagctcattgctgcaaagttctgctttgctggacttgttataggccagactgaagttgacatcatgagtcatgctacccaagctatatttgaaatcctggagaagtcctggcttccccagaactgtacactggttgatatgaagattgaatttggtgttgatgtaaccaccaaagagattgttctggctgatgttattgataatgattcctggagactctggccatcaggggatcggagccagcagaaagacaaacagtcttaccgtgacctcaaggaagtaactccggaaggactgcagatggtaaagaagaactttgagtgggttgcagatcgagtggagttactcctgaagtcagatagtcagtgcagggttgtagtgctgatgggttccacttctgaccttggtcactgtgagaaaattaaaaaggcttgtggaaacttcgggattccatgtgaacttc

SEQ ID NO: 3883 - DNA, 551 bp, Cricetulus griseus; identical to SEQ ID NO: 241

SEQ ID NO: 3884 - DNA, 584 bp, Cricetulus griseus; identical to SEQ ID NO: 242
  misc_feature (512)..(512): n is a, c, g, or t

SEQ ID NO: 3885 - DNA, 570 bp, Cricetulus griseus; identical to SEQ ID NO: 243
  misc_feature (51)..(70): n is a, c, g, or t

SEQ ID NO: 3886 - DNA, 356 bp, Cricetulus griseus; identical to SEQ ID NO: 244
  misc_feature (298)..(298): n is a, c, g, or t

SEQ ID NO: 3887 - DNA, 600 bp, Cricetulus griseus
gaagatggttccaataagaaggagacacagacggattctgtttctaggtatgacagcagttccacgtcatcaagtgatcggtatgattccttgctgggtcgctctggttcatatagttacttagaagaaagaaaaccttatagtagcaggctagaaaaggatgatksaactgacttcaaaaagctttatgaacaaattttagccgaaaatgaaaagctaaaggcacagctacatgatacaaatatggaactaacggatctaaagttgcagttggaaaaggctacccagagacaagaaagatttgctgataggtcactgttagagatggaaaagagggaacgaagagctctagaaagaagaatatctgaaatggaagaagagctcaaaatgttgccagacttaaaagcagacaaccagaggctaaaggatgaaaatggggccttgatcagagtcataagcaaactttccaaataggacggagaagagaaacaagcaaagcagcaggacttgcacatactccgcagtggaccacattggcagccactggacacccgaaagaacctttggagactcatttcccgatatcctgccaaatgccct

SEQ ID NO: 3888 - DNA, 580 bp, Cricetulus griseus; identical to SEQ ID NO: 246

SEQ ID NO: 3889 - DNA, 282 bp, Cricetulus griseus; identical to SEQ ID NO: 247

SEQ ID NO: 3890 - DNA, 600 bp, Cricetulus griseus
cctggggcccgtggactgggaacgggaccttctggctgccagctgtgaaaccgtttcargagggtgtctacctggctactgtgcacctgccctatctgcaaggacaggtctccctgcagctgactgtgcacaagtcccccaaagtgtctctgacaccagcaccccttgtgtgggctgccccargagaggcacccccggagctgctctgcctcgtgtcccatttctaccctgcggaaggcctggaggtggagtgggagctcagaggtggtccagaaggcggttccagawaggctgagggggggacgtggctctccaccgtccgccaccattctgatggctctgtcagccaggccgggcacctgcggctccccccagtcactgcccagcagcatggagtccgctatgcctgtcgggtccaccaccccagcctgcccgcatcgggtcgcagtgctgaagtcaccctggaagtggcaggcctctctgggccttcagtcgaggacagcataagcctgttcctgtccgctttcctcctcctgggactcatcaaggcactgggctggatggctgcctacgtgaccttccgtgaagactcaaaggtga

SEQ ID NO: 3891 - DNA, 536 bp, Cricetulus griseus; identical to SEQ ID NO: 249
  misc_feature (226)..(240): n is a, c, g, or t

SEQ ID NO: 3892 - DNA, 581 bp, Cricetulus griseus; identical to SEQ ID NO: 250

SEQ ID NO: 3893 - DNA, 580 bp, Cricetulus griseus; identical to SEQ ID NO: 251

SEQ ID NO: 3894 - DNA, 379 bp, Cricetulus griseus; identical to SEQ ID NO: 252

SEQ ID NO: 3895 - DNA, 524 bp, Cricetulus griseus; identical to SEQ ID NO: 253
  misc_feature (210)..(222): n is a, c, g, or t
  misc_feature (224)..(237): n is a, c, g, or t

SEQ ID NO: 3896 - DNA, 579 bp, Cricetulus griseus; identical to SEQ ID NO: 254

SEQ ID NO: 3897 - DNA, 433 bp, Cricetulus griseus; identical to SEQ ID NO: 255
  misc_feature (186)..(208): n is a, c, g, or t

SEQ ID NO: 3898 - DNA, 580 bp, Cricetulus griseus
caccattgaaattctaagtgatgtgcagctgataaaaactggagacaaagtaggagccagtgaagccacactgctgaacatgctcaacatctcccccttctcctttgggctgatcatccagcaggtgtttgacaatggcagcatttacaacccagaagtgcttgacatcacagagcagactttgcactcacgcttcctagagggtgtccgaaatgttgccagtgtttgtctgcagattggttacccgactgttgcctcagtgccacactctatcatcaatggttacaagcgggtcctggctttgtctgtggagactgattacaccttcccacttgctgaaaaggtcaaggccttcttggctgatccatctgcatttgcggctgctgctcctgtggctgctgccaccactgctgctcctgctgccgctgcagccccagcgaaggctgaagccaaggaagagtcggaggaatcagatgaggatatgggatttggtctgtttgactgatccctcagagcaacctactcagccagtttaatttgagaaatatggaaataaagaataaagtcttacttctgttgt

SEQ ID NO: 3899 - DNA, 589 bp, Cricetulus griseus
gaaggacaagttgtctgttttgatgccaagataaactttgatgacaatgctgagttccgacaaaaggacatatttgctatggacgacaaatsagagaatgagcccattgaaaatgaagctgycargtaccatcttaagtacatcggactagacrggaacattgyctgcttcgkkaatggcgctggattagccmtggctrcttrtsacataattktsctgaatggagggaagccagctaacttyytkraccytggargtggkgtaaaggaagcccaagtctatcaagcattcaaactgatcacatctgatcccaaggtggaagccatcctcgtcaatatatttggtgggattgtcaactgtgccatcattgccaatgggatcaccaaagcctgccgggagttagaactcaaggtgccactagtagtccggcttgaaggaactaatgtccaagaggctcagaaaatcctcagaaacagtggcctccctatcacatcagctgcggacctggaggatgctgccaagatagctgttgccagtgtggcaaagaagtgatgtgatggcttcccccggctcccgtgaagataggcac

SEQ ID NO: 3900 - DNA, 688 bp, Cricetulus griseus; identical to SEQ ID NO: 258

SEQ ID NO: 3901 - DNA, 600 bp, Cricetulus griseus
gtcaatggcaaggtgaagggaaggatcttcgtggggaacagccaggtgcccgtggtgtttgagaacactgacctacactcctatgtggtgatgaaccatggacgctcttacacagccatcagcaccattcctgaaactgttgggtattctctgcttcccctggsrcccattggaggcatcattggatggatgtttgcagtggagcakaaygggttcaagaatgggtttagcatcactgggggcgagttyayccgacaagccgaggtgaccttcttggggcacccggkcaakctggycctgaagyarcactycaktggtattgackaacacggacacctgaccatcaacacagaactagacggccgagtgccacagatcccctatggttcttcagtgcacattgagccctacacagagctgtatcactactccagctcagtgatcacttcctcctccaccctggagtacacggtgactgatcctgatccggacggcactgcaccctcacacacccatgtttaccagtggcgtgagaccattacctttcaagagtgtgtccatgatgacttcatgccatccctgcccattacccatcatctc

SEQ ID NO: 3902 - DNA, 586 bp, Cricetulus griseus; identical to SEQ ID NO: 260

SEQ ID NO: 3903 - DNA, 587 bp, Cricetulus griseus; identical to SEQ ID NO: 261

SEQ ID NO: 3904 - DNA, 579 bp, Cricetulus griseus; identical to SEQ ID NO: 262
  misc_feature (455)..(472): n is a, c, g, or t

SEQ ID NO: 3905 - DNA, 579 bp, Cricetulus griseus; identical to SEQ ID NO: 263

SEQ ID NO: 3906 - DNA, 600 bp, Cricetulus griseus
tttaaggaggaagaaacagccactgtgcctcatggattctatgctctcccrsrggcattgtggggtgatgctccctgggtgccaagccctattctargtactgtgaacagcmaakagctggctwggggtgggggataccttgctggctgagytgccacagtgycatatrctsccakgccakcatscasgctggkcacatwwcwtaccwvasytkgccttstggggctaggtttctgttcacaggacagtcctcttcattggtgccccakatgccttgtatcttgcactttaaacaaagggagcatctctgtgccaaagaccaaaggcctcactcaccctgtgcctcatgaccacaagtcaggcaagactggaattgtgccacttgcatccaccccttcaggcaggaaaacctgcttgaaggcttggcccaagagtcaagacaaaaggatgagactccaaagaagccaacatccacctcaaggaatgaggggtcaagtcccttcaccctggtggcctctaattggagctccacagttggagaggaaaagaccagatatggatgggcctaatgccatacagaaaatctcaagccctgttatg

SEQ ID NO: 3907 - DNA, 600 bp, Cricetulus griseus
agcgtcctacctaaggtacgctgggagacgctgygatggcsagktcrgcagccgcagcctccttccttgctccgactctggagcarctccggcacctgscagcggasctgcggtcacttctgcctctagtgarggwcrgcgaagcccaggakacakccgaggaatttaatcgagagaygttctggagaagacttaatgaggcagcagkgaacctgtcaggggaagccackattctgaccacacttttckcccgacttccactgccgtctccacrggaaacccakaggatctgtgagcaaatkcatgttggcatcaarsaaattattgamstatatyattcacttcctaaaaatcasgggatcaccctgagaaagctggtgcggaatgctactwtggacgttgtggatggcatggctcatctyctggwagtgcttatctctccatctyakagcactgagaactgygaccttattycckgcwatagtgtctcggtagcatgccaaaaggtgtctgagattccaaaagataacaaggctgcagcccttatgatgctgacaaagtgtgtgaatcctgtgaaagatgcacatgaagaaatggagc

SEQ ID NO: 3908 - DNA, 579 bp, Cricetulus griseus; identical to SEQ ID NO: 266
  misc_feature (327)..(327): n is a, c, g, or t

SEQ ID NO: 3909 - DNA, 600 bp, Cricetulus griseus
cctctgagttcttcargtctggcaaatatgacctagacttcaagtctccggatgaccccagcaggcacatcacacctgaccagctggctgacctgtataagtccttcatccaggagtatccagtggtgtccatcgaggacccctttgaccasgacgactgkgaggcctggaaraatttcacakctagtgcakgcatccasgtggttggggatgatctcacagtaaccaaccctaasakgattgccaaggctgtcagtgagaaktcctgcaactgcctcctgctcaaagtcrrccagattggctctgtgaccgagtctctgcaggcgtgtaakctggctcagtccaatggctggggtgtcatggtgtcccatckctccggggagacagaggacactttcattgccgacctggtggtarggctctgcactgggcagatcaagactggtgccccttgccgatctgagcgtctggccaactacaatcagatccttataatcaaggaagagctgcgcatcaaggccaagtttgctggcataagcttcaggaaccccctggccaactaaagtgtgtggagatcctgaaaacacctgccgcttagcc

SEQ ID NO: 3910 - DNA, 600 bp, Cricetulus griseus
  misc_feature (511)..(533): n is a, c, g, or t
cttattagagagggcatcacagggctgtatcggggcatggctgcacccatcattggagtcacccctatgttcgctgtgtgcttctttgggtttggtttggggaagaaactacagcagaaatctccagaggatacacttaactacccacagctgtttgcagctggaatgtkrkskggtgtgttcaccacgggaatcatgacccctggagaacggattaaatgcttgctgcagattcaggcttctacgggggaaaccaaatacactggtaccttggactgtgcaaagaagctctatcaggagtttgggatccgtggcttctacaaagggactgtgctgaccctcatgcgagatgttccagccagtgggatgtatttcatgacatatgaatggcttaaaaatctcttcactccagagggaaagagtgtcagtgacctcagtgtaccccggatcctcgtggctggaggctttgccgggatcttcaactgggctgtcgcaatccccccagatgtgnnnnnnnnnnnnnnnnnnnnnnnccctcctgggaaatatccccatgggttcagaaacgtgctgagagagctgatccgggatgaaggagtg

SEQ ID NO: 3911 - DNA, 600 bp, Cricetulus griseus
caagggggcaaaggaccgawggacaaattccagaagccaaatacattcaacawgaagaggaagttccagccagatggtaaaagcgacgaatcakcagccmagaaacccawatgggatgacttcgaaaagaataataaagagctgaagcagagcaggcagctcagtgataagaccaactatgacatcgtggttcgagcaaagcacatttgggaragcttgagaagaaaagactgygrtmaagaaaawagaaggaagctgatgagtgatttgcagaaattgattcmasggaaaattaaaactattgctttcgcacatgactcgacacgtgtgatccagtgcttcattcagtatggaaatgaagagcagaggaagcaggcttttgaagaactacaaggtgacttggttgaactaagtaaagccaaatattccaggaatattgtcaagaaatttctcatgtatggaagtaaaccacagatagcagagataatcagaagttttaaaggtcacgtgaggaagatgctgcgacattcagaggcatcagccatcgtggagtatgcgtacaatgacaaagccattttggaacagaggaacatgctgacc

SEQ ID NO: 3912 - DNA, 600 bp, Cricetulus griseus
  misc_feature (530)..(564): n is a, c, g, or t
ttctaccgccagctgctgctgactgctgatgaccgtgtgaatccctgcattgggggggtgatccttttccatgaaacactgtaccakaaggccgatgatggacgtcccttcccccaagttatcaagtccaarggcggkgttgtgggcattaargtagataaaggcgtggtgcctctggcaggaaccaatggtgagaccaccactcaargactggatgggctgtctgaacgatgtgcccagtacaagaaggatggagctgactttgccaagtggcgttgtgtgctaaagattggggaacatactccctcagcccttgccatcatggaaaatgccaatgttctggcccgttatgccagcatctgccagcagaatggcattgtacccattgtggagcccgaaatcctscctgatggggaccatgacttaaagcgctgtcagtatgtaactgagaaggtactggctgctgtctacaaagctctgagtgaccaccatgtctatctggaaggcacactgttgaagcccaacatggnnnnnnnnnnnnnnnnnnnnnnnnnnnnnnnnnnnaatgaggagattgccatggcaactgtcacagcactt

SEQ ID NO: 3913 - DNA, 508 bp, Cricetulus griseus; identical to SEQ ID NO: 271

SEQ ID NO: 3914 - DNA, 600 bp, Cricetulus griseus
tcattctgaggcgcttgaagaacttttgtacaccatgggtgtaggaggcatcctacagctccaagccagcattgcaactgtaagacccctggaaagctcargcttccaggatcttagcccaggactgaagccaccccaatcaccaggctgagttgaaagcttgatgcaaactgcatgaggctttattgttgtttaacgagctaaccctatgttatctcgggtctttcacccacccgccatggcagatagctagcaaagatagttcgaagcgtctgcatagagatcttgtagggcagagtaaggggagtgtctaggggtacgcacaggctcaggattggtgtgcctccaggcttggagggcttgccctgtgttgattggccaactggttgttatggcccataggccctcgcagggtggttgctatgctctgcacatcattgctgtgcacttgtccgtaaagcacacccagagccgtaaagcataccaccaccagctaacttctgattggttccttgcaggaggcacgcatctgaccttagtgactaaggtcagataatcatgtgttcagctgttatggctgccgaaatggggagctggtcg

SEQ ID NO: 3915 - DNA, 580 bp, Cricetulus griseus; identical to SEQ ID NO: 273

SEQ ID NO: 3916 - DNA, 574 bp, Cricetulus griseus; identical to SEQ ID NO: 274

SEQ ID NO: 3917 - DNA, 534 bp, Cricetulus griseus; identical to SEQ ID NO: 275
  misc_feature (296)..(313): n is a, c, g, or t

SEQ ID NO: 3918 - DNA, 536 bp, Cricetulus griseus; identical to SEQ ID NO: 276
  misc_feature (363)..(379): n is a, c, g, or t

SEQ ID NO: 3919 - DNA, 578 bp, Cricetulus griseus; identical to SEQ ID NO: 277
  misc_feature (226)..(283): n is a, c, g, or t

SEQ ID NO: 3920 - DNA, 600 bp, Cricetulus griseus
tctgcttgtctgatcacccagkatgccgcgtggaagccgaagccgctcttcccgggtggcccctccggccagccgggcccctcagatgagggctgctcctagacatgcacctgcagctcagcctccagcagcagctgcaccatctgcagttggctcccctgctgstgcacccaggcagccaggcctgatggcccagatggcaaccactgcarctggtgtggctgtgggctctgcggtgggtcacaccctgggtcatgccatcactgggggcttcaktgggggtggcagtgctgagcctgcaagacctgacatcacttaccaggagccccagggaacccagctgctggaccagcagcgagggccatgctctcttgagatcaaacagtttctggaatgtgcccagaaccagartgacstcargctttgcgarggtttcawtgargwgttgcgacagkgcavaattgcmaatggkttaatctaatcmagaakytcaaactgaasaaakgggctctgcctmattgatagkgaaagtgkggaccctgagkaaacaaatcttatytctwatarctsctttacttcagccatggagagartsctaac

SEQ ID NO: 3921 - DNA, 282 bp, Cricetulus griseus; identical to SEQ ID NO: 279
  misc_feature (191)..(192): n is a, c, g, or t

SEQ ID NO: 3922 - DNA, 600 bp, Cricetulus griseus
actggattgtcacacagctcacatagcatgcaagtttgctgagcttaargagaagattgatcgccgttctggtaagaagctggaagatggcsctaaattcttgaaatctggtgatgcagccatcgttgatatggttcctggcaagcccatgtgtgttgagagcttctctgactatcctccactgggtcgttttgctgttcgtgacatgaggcagacagttgctgtgggtgtcatcaaagctgtggacaaraargctgctggagcgggcaaagtcaccaagtckgcccakaaagctcagaargctaaatgaatattacccctaacacctgccaccccagtcttaatcagtggtggaagaacggtctcagaactgtttgtctcaattggccatttaagtttaatagtgaaagactggttaatgataacaatgcatcggaaaaccttcaggaggaaaggagaatgttttgtggaacatttttgtgtgtgtggcagttttaagttattagttttcaaaatcagtactttttaatggaaacaacttgaccaaaaatctgtcaakwwttttgagacccattaaaatacaagtttaatgagaaaaaa

SEQ ID NO: 3923 - DNA, 600 bp, Cricetulus griseus
cttccagactgaagccgtctgtacagagcctcaattcagttcctgggaagacaagaaaataaaaagayacttctttaaaaatggcgatggtatcakaattcctcaagcaggcctggtttattgacaaccaagaacaggaatrtgtkcaagctgtaaaatcatccaaaggtggtcctgggtctgccgtgagtccctacccatccttcaatccatcctcagatgttgctgccttacacaaagctatcatggttaaaggtgtggatgaagcaaccattattgacattcttaccaagagaaccaatgctcagcgccagcagatcaaggcagcatacttgcaggaaactggaaagcccctggatraaatgctgagaaaagcccttacaggccatctggaagaggttgttttggctctgctaaaaactccagcccagtttgatgcasatgaactccgtgcggccatgaaggggcttggaacagatgaagacactctcattgagattttggtatcaagaaataacagagawatcagagaaatcaacagartctacagagaagagctaaagagagatctggccaaagacatcacttcggatacttctg

SEQ ID NO: 3924 - DNA, 600 bp, Cricetulus griseus
  misc_feature (27)..(51): n is a, c, g, or t
  misc_feature (85)..(133): n is a, c, g, or t
  misc_feature (165)..(212): n is a, c, g, or t
  misc_feature (251)..(293): n is a, c, g, or t
  misc_feature (481)..(504): n is a, c, g, or t
tctgctcgcgtcaccgccgggatgaannnnnnnnnnnnnnnnnnnnnnnnngcggtccatcacgcagatcaagtacaaccgcgannnnnnnnnnnnnnnnnnnnnnnnnnnnnnnnnnnnnnnnnnnnnnnnntactctgtgaatggcgagaggctgggcacctnnnnnnnnnnnnnnnnnnnnnnnnnnnnnnnnnnnnnnnnnnnnnnnnaccaagcatgtccttactggctcagctgataacagctgnnnnnnnnnnnnnnnnnnnnnnnnnnnnnnnnnnnnnnnnnnngaagaccaactcagccgtccgaacctgtggctttgacttcgggggtaacatcatcatgctctccacagacaagcagatggggtaccagtgttctgtgagcttcttcgatctacgggatccaagccagattgacaccaatgagccctacatgaagatcccctgcaatgactccaagatcaccaktgccnnnnnnnnnnnnnnnnnnnnnnnnattattgcaggacatgagagtggtgagctcaaccagtatagcgccaagtctggggaggtgttkgtgagcgttaargaacactcccsgcagatcaat

SEQ ID NO: 3925 - DNA, 600 bp, Cricetulus griseus
gctgacatctgagtatcakttgctaactacaggctgkyctaagtrgactgcgakccctggacttgctgtggatgtgaaccaktccagctgatrtggacaccccctgtctctgcaacagtgtstgctaaccadaagcccctgatraattccccattgsctarattcctttttgcttttgactagcatttcaaccttctggggtccctaacttcgtcccaaagtcagcasgaagcagtytggaaaagaatttcrcygtccattttccctggttraaatgctaagtcaaaakgaactcccttgcatggggatgacagtatctatcactccctgatggggatgctagagagacagcamttccatgattggaatttacaaaaaasaaaatgggggaatgaasgaaccggcttcccttttggcagmcataayagccsaacatgtgcttgscatatacctgccttggtcacttakaggtcakatgccygtcttgtgacaaggaaccaatcagaagttagctggtggcgctatgctttacgaccctgggtgtgctttacggacaagcgcacagcaatgacgtagagagcatagcaaccaccctgggag

SEQ ID NO: 3926 - DNA, 600 bp, Cricetulus griseus
ttgagacggtgaggccacttytctactacctycctctytggtgtggcctctcggccaaagctcccatccacagctgggatgtctgagccacakyctgctgcactgttwycgctctgggatcttctgagttacttttttaggctgtggtttggygamargawccmacacattaacgatyytttttttccccaaaagcchctgwawaattcttggcatgttttsatgkccctgttggctgcctggtttgggagcagttgtggaraadaggacagtmccacacagagtgtggaattttgggagctgcttgkggcctgcctgtttctggcatgtaccctgggcgtgtgctgwacctgctgggccagctgcgcacgtttctaccctgtccctggagcahcascgtgagcascatgagtgkctctggaagyttaaagtggagtgttctakgaagtgtccctgacavaattccctgttctctatgaccccatttgggctctcagcccctytakcaactttatgccccggycctatctttgctcccgtcctctcygtctgctagtccttgaagcctttaaccaaatgggagtgggtgcagaaagcctt

SEQ ID NO: 3927 - DNA, 584 bp, Cricetulus griseus; identical to SEQ ID NO: 285

SEQ ID NO: 3928 - DNA, 560 bp, Cricetulus griseus
ggtggcgcgcggcggcaagatggcggtgcagatttccaagaagaggaagtttgtggctgatggcatcttcaaagcagagctgaatgagtttctcactcgggaactggctgaagacggctactcgggagttgaagtccgagttacaccaaccagaacagaaatcattattttagccaccagaacacaaaatgttcttggtgagaagggtcgtcgaatcagagagttgactgcggtagttcaraagaggttcggcttccctgagggcagcgtagagctttatgcagaaaaggtggccacaagaggtctgtgtgccattgctcaggcagagtctctacgttacaaactcctargaggacttgctgtgcgaagggcctgctatggtgtgcttcggttcattatggagagtggggccaagggctgtgaggttgtggtgtctgggaagctccgaggacagagagccaagtccatgaagtttgtggatgggctgatgatccacagtggagaccctgttaactactatgttgatactgcggtacgccatgtactcctcagacagggtg

SEQ ID NO: 3929 - DNA, 1051 bp, Cricetulus griseus; identical to SEQ ID NO: 287

SEQ ID NO: 3930 - DNA, 600 bp, Cricetulus griseus
  misc_feature (27)..(45): n is a, c, g, or t
acaactggggaactgtcaaagatgaannnnnnnnnnnnnnnnnnncaaatgtgaccgaggaaacacctgaaggtgaagagcacccagtggcagacactgaaaataaggagaatgaagttgaagaggttaaggaagagggtccaaaagagatgactttggatgagtggaaagctattcaaaataaagaccgagcaaaagtagagtttaatatccgaaaaccaaatgaaggtgctgatggacaatggaaaaagggatttgttctgcataaatcaaaaagcgaagaggctcatgctgaagattcggttatggaccatcatttccggaagccagcaaatgatwtaacgtctcaactagagatcaattttggagacctaggccgcccaggacgtggtggcagaggaggacgtggtggacgtggacgtggtggacgtccaaaccgtggcagcagaactgataagtcaagtgcttctgctcctgatgtagatgacccagaggcattcccagctctggcctaactggatgccataatacaacactggttcctttgtggaccctcctgttcaaagcttttgcatgcttaaggatcccaaacaactaaga

SEQ ID NO: 3931 - DNA, 578 bp, Cricetulus griseus; identical to SEQ ID NO: 289

SEQ ID NO: 3932 - DNA, 600 bp, Cricetulus griseus
attccacaatacaaaacaggtgacaagaggttttgctggtggtgttcaracagtaactttaattccaggagatggaattggcccagaaatctccgcctcagttatgaagatttttgatgctgccaaagcccctattcaatgggaggagcgtaatgtcactgccattcaaggaccaggaggaaagtggatgatccctccagaagccaaagagtccatggataagaacaagatgggcttgaaaggcccactaaagaccccaatagcagctggccatccatctatgaatctgttgctccgtaagacatttgacctttatgccaatgtccggccatgtgtctcaattgaaggttataaaaccccttacacggatgtaaatattgtcaccatccgagagaacacggaaggagaatrcagtggaattgagcatgtgatcgytgatggagttgtgcakakcatcaagctcatcaccsaacaagcgagcaakcgcattgctgaktttgccttcsagtacgctaggaacaaccaccggakcaacgtcacagcggwgcacaaagccaacatcatgcggtatgtcagatgggctttttctgcataaaatgc

SEQ ID NO: 3933 - DNA, 599 bp, Cricetulus griseus
  misc_feature (474)..(493): n is a, c, g, or t
gcytctgcgttctggtagtggcgctgcttgggccggtggctgaastgagagctgctggtgtcgcgattgaggagaactgcgagtgtgttcagcctgtccccttcgggatcccakccacgatgagtgctgcccgggagtytcacccayackgggtgaagcgttcagcctcccccgacgacgatcttggatctagcaaytgggaagcagcagacttaggcratgaagagagaaaacaaaagttcttgagacttatgggtgcaggaaagaaagaacacactggtcgtcttgttataggagatcacaaatcaacatctcacttccgaacaggggaagaagacaagaaaattaatgaagaactggagtctcagtaccagcagagcatggacagtaaactatcaggccgataccggcggcactgtggacttggcttcagtgaggtagaagatcatgatggagaaggtgatgtggctggannnnnnnnnnnnnnnnnnnngccggatgccgagagtccagatgactcagacagtgattctgagtctgagaaggaggagtctgcagaagaactccatgctactgagcatcctgatgatgcagaagac

SEQ ID NO: 3934 - DNA, 579 bp, Cricetulus griseus; identical to SEQ ID NO: 292

SEQ ID NO: 3935 - DNA, 581 bp, Cricetulus griseus; identical to SEQ ID NO: 293

SEQ ID NO: 3936 - DNA, 664 bp, Cricetulus griseus; identical to SEQ ID NO: 294

SEQ ID NO: 3937 - DNA, 574 bp, Cricetulus griseus; identical to SEQ ID NO: 295

SEQ ID NO: 3938 - DNA, 452 bp, Cricetulus griseus; identical to SEQ ID NO: 296

SEQ ID NO: 3939 - DNA, 508 bp, Cricetulus griseus; identical to SEQ ID NO: 297

SEQ ID NO: 3940 - DNA, 485 bp, Cricetulus griseus; identical to SEQ ID NO: 298

SEQ ID NO: 3941 - DNA, 578 bp, Cricetulus griseus; identical to SEQ ID NO: 299

SEQ ID NO: 3942 - DNA, 386 bp, Cricetulus griseus; identical to SEQ ID NO: 300

SEQ ID NO: 3943 - DNA, 495 bp, Cricetulus griseus; identical to SEQ ID NO: 301

SEQ ID NO: 3944 - DNA, 547 bp, Cricetulus griseus
gccaaactctgctcagcaaactgaccgaagctcacctgttagagccagtagtgaaaagaatgattgccttcgagggaaacgagatggagtcaacagtcttgaaagaaaattgaagagacgcccagaaagagaaggccttcccagtgaacggtgggatcgagttaaaaaaatgcggaccccccaaaagaagaaaatcaaattgagtcaccccaaggacatgaacaatttcaaattagaaagagagcgtagctatgacttagtccgtaatgctgaaacacattcgctaccctcagacacgtcctactcggagcaggaggactctgaggatgaagatgccgtctgtccagctgtgagctgcctgcagccagaaggagatgaggtggactgggtccagtgtgatggcagctgcaatcagtggtttcaccaggtctgtgttggtgtctctccagagatggcagagaaggaagactacatctgtgtgcgctgcatggcaaaggacacaccaagccgaaagtaaaaacaaaacacactcacttaatggaattca

SEQ ID NO: 3945 - DNA, 211 bp, Cricetulus griseus; identical to SEQ ID NO: 303
  misc_feature (70)..(113): n is a, c, g, or t

SEQ ID NO: 3946 - DNA, 344 bp, Cricetulus griseus; identical to SEQ ID NO: 304
  misc_feature (32)..(48): n is a, c, g, or t

SEQ ID NO: 3947 - DNA, 459 bp, Cricetulus griseus; identical to SEQ ID NO: 305
  misc_feature (94)..(108): n is a, c, g, or t
  misc_feature (405)..(421): n is a, c, g, or t

SEQ ID NO: 3948 - DNA, 578 bp, Cricetulus griseus; identical to SEQ ID NO: 306

SEQ ID NO: 3949 - DNA, 295 bp, Cricetulus griseus; identical to SEQ ID NO: 307

SEQ ID NO: 3950 - DNA, 573 bp, Cricetulus griseus; identical to SEQ ID NO: 308

SEQ ID NO: 3951 - DNA, 559 bp, Cricetulus griseus; identical to SEQ ID NO: 309
  misc_feature (441)..(465): n is a, c, g, or t

SEQ ID NO: 3952 - DNA, 593 bp, Cricetulus griseus; identical to SEQ ID NO: 310
  misc_feature (457)..(471): n is a, c, g, or t

SEQ ID NO: 3953 - DNA, 585 bp, Cricetulus griseus; identical to SEQ ID NO: 311

SEQ ID NO: 3954 - DNA, 509 bp, Cricetulus griseus; identical to SEQ ID NO: 312

SEQ ID NO: 3955 - DNA, 579 bp, Cricetulus griseus; identical to SEQ ID NO: 313

SEQ ID NO: 3956 - DNA, 578 bp, Cricetulus griseus; identical to SEQ ID NO: 314
  misc_feature (92)..(111): n is a, c, g, or t
  misc_feature (329)..(350): n is a, c, g, or t

SEQ ID NO: 3957 - DNA, 581 bp, Cricetulus griseus; identical to SEQ ID NO: 315

SEQ ID NO: 3958 - DNA, 600 bp, Cricetulus griseus
aaatataataaaaacaaagtgaagaaaaggggcaaatccaaaagtaggagtaagagcaaagagagatccaaaagtaaggaaagagaatcaaagcataacaaacacgaagacaagaggatgaggtcaagaagtaaagacagggatcatgagactattaaagaaaaagaaaaacaggtggattctaaagggaaagatcaggaaaggagtagaagcaaagagaattctaaacaggtagaatcaaaaagtgatgagcatgatcatagcaaaagtaaagaaaaggatagacgtgcacagtctawgagtagagaacgtgatctaactaaaagtaaacacagttacaacagtagaacaagggagcgaagcagaagcagggacaggagcagaagagtgcgctctataagccatgacagagatcgcagcagaagcaaggagtaccacaggtacagagaacaggagtataggagaagaggaaggtcacggagccgggatcgaagaactccaggacgatcaagaagtaaagacaggaggagaagaaggagagattcccggagctcagaaagagaagatagtcaaagtcgaaacaaagagaaatatagaagc

SEQ ID NO: 3959 - DNA, 444 bp, Cricetulus griseus; identical to SEQ ID NO: 317

SEQ ID NO: 3960 - DNA, 521 bp, Cricetulus griseus
  misc_feature (155)..(213): n is a, c, g, or t
gaagcagggagcaccctgatctgcaactgtggtgccagccctggaaacagcagtctgcagaggggagagtgcatcccagacacatccacatcacagacaccaggagcaaagaggagtccccaagctatagaactttgaatggggcattgtataannnnnnnnnnnnnnnnnnnnnnnnnnnnnnnnnnnnnnnnnnnnnnnnnnnnnnnnnnnagaagccccgcacctactacccagctgtggagcagaagctggtagtagagaccagaggatctgccctcgatgatacagtcaaccccctctgtgagaatggtgatgaccccctctcccctcgcctaagctggcctctcgaccaagacaggagcagaggggacagtgataccaaacctagctccccaaaggtgaaggaatacgtttcgaagaaggtcctgccggaagaatcccctgctctgaagctgctggacagatgcggataatggctggtgagtttctcacaccagtgggagttcaacctgctgacg

SEQ ID NO: 3961 - DNA, 551 bp, Cricetulus griseus; identical to SEQ ID NO: 319

SEQ ID NO: 3962 - DNA, 580 bp, Cricetulus griseus; identical to SEQ ID NO: 320

SEQ ID NO: 3963 - DNA, 305 bp, Cricetulus griseus; identical to SEQ ID NO: 321
  misc_feature (227)..(246): n is a, c, g, or t

SEQ ID NO: 3964 - DNA, 579 bp, Cricetulus griseus; identical to SEQ ID NO: 322

SEQ ID NO: 3965 - DNA, 567 bp, Cricetulus griseus; identical to SEQ ID NO: 323
  misc_feature (256)..(269): n is a, c, g, or t
  misc_feature (271)..(284): n is a, c, g, or t

SEQ ID NO: 3966 - DNA, 392 bp, Cricetulus griseus; identical to SEQ ID NO: 324

SEQ ID NO: 3967 - DNA, 140 bp, Cricetulus griseus; identical to SEQ ID NO: 325

SEQ ID NO: 3968 - DNA, 319 bp, Cricetulus griseus; identical to SEQ ID NO: 326

SEQ ID NO: 3969 - DNA, 558 bp, Cricetulus griseus
  misc_feature (30)..(30): n is a, c, g, or t
  misc_feature (32)..(33): n is a, c, g, or t
cgacttaggggcactcgctggcaagaatcncnnggaggtacgcccgagggacctcaggaaaccatgcccgaaaccacacagtgaagcagggactgccttcattcagacccagcagctccatgcagctatggctgataccttcctggaacatatgtgccgcctggacattgactccgcacccatcacggcccgcaacactggcatcatttgtaccattggtcctgcctcccggtctgtggagatgctgaaggagatgatcaagtctggaatgaatgtggctcgtttgaatttctctcatggaactcatgagtatcacgcagagactatcaagaatgtgcgaacagccacagaaagctttgcatctgaccccatcctctaccggcctgttgctgtggctctggacacaaagggacctgagatcaggactggactcatcaaaggcagcggcactgcagaagtagagctgaagaagggagccaccctgaagatcaccctggacaacgcctacatggagaagtgtgatgagaacatcctgtggctggactataagaacatctg

SEQ ID NO: 3970 - DNA, 579 bp, Cricetulus griseus; identical to SEQ ID NO: 328

SEQ ID NO: 3971 - DNA, 582 bp, Cricetulus griseus; identical to SEQ ID NO: 329

SEQ ID NO: 3972 - DNA, 568 bp, Cricetulus griseus; identical to SEQ ID NO: 330

SEQ ID NO: 3973 - DNA, 578 bp, Cricetulus griseus; identical to SEQ ID NO: 331
  misc_feature (95)..(112): n is a, c, g, or t

SEQ ID NO: 3974 - DNA, 203 bp, Cricetulus griseus; identical to SEQ ID NO: 332

SEQ ID NO: 3975 - DNA, 345 bp, Cricetulus griseus; identical to SEQ ID NO: 333
  misc_feature (294)..(310): n is a, c, g, or t

SEQ ID NO: 3976 - DNA, 569 bp, Cricetulus griseus; identical to SEQ ID NO: 334

SEQ ID NO: 3977 - DNA, 577 bp, Cricetulus griseus; identical to SEQ ID NO: 335
  misc_feature (109)..(126): n is a, c, g, or t

SEQ ID NO: 3978 - DNA, 578 bp, Cricetulus griseus; identical to SEQ ID NO: 336

SEQ ID NO: 3979 - DNA, 566 bp, Cricetulus griseus; identical to SEQ ID NO: 337

SEQ ID NO: 3980 - DNA, 563 bp, Cricetulus griseus
caatggccttcgcaaatctgcgcaaagtgctcatcagtgacagcctggacccctgctgccggaagatcctgcaagatggagggctgcaggtagtggagaagcagaacttgagcaaggaggagctgatagccgagctgcaggactgcgaaggccttattgtccggtctgccactaaggtcaccgctgatgtcatcaatgcagcagakaagctccaggtggkgggcagggctggcacaggcgtggacaacgtggatctggaggctgccacgaggaagggcatcctaktcatgaacacccctaatggaaacagcctcagcgccgcagaactcacctgtgggatgatcatgtgcctggccagacagattccccasgcaacagcttcgatgaaagatggcaaatgggaccggaaaaagttcatggggacagagctgaacggaaagacactgsgaattcytggcctgggcagaatyggaagagasgtggccacccgaatgcagtcctttgggatgaagactgtaggctatgaccccatcatttctccagaggtggcgggctcctttgga

SEQ ID NO: 3981 - DNA, 600 bp, Cricetulus griseus
agaccaatacagagcaactgattttgttgttcccgggcctggaaaagtagagataacctacacaccaaaagatggaactcaaaaggtgacatacgtggtgcataactttgaagaargtggcggtgttgccatgggcatgtacaacgaggataagtcaattgaagattttgcacacagttccttccagatggctctgtctaaaggctggcctttgtatcwmagcaccaaaaacactattctgaagaagtacgatggacgtttcaaagacatctttcakgagatctatgacaagcaatacaaatcccagtttgaagctcagaagatctggtatgagcataggctcattgatgacatggtggcccaagctatgaaatcagagggaggctttatctgggcctgtaaaaactatgatggcgatgtgcagtcagactcagtagcccaaggttatggttcccttggcatgatgaccagtgtgctgatttgtccagatggtaagactgtagaagcagaggctgcccatggcactgtcacacgtcactaccgcatgtaccagataggacaggagacatccaccaaccccattgcttccatttttgcttg

SEQ ID NO: 3982 - DNA, 583 bp, Cricetulus griseus
catacccaggctatccccctacmggsyrsysacctktccctgsmtatcmkcctgcaggtcaggagtcatcctttccccctccgggtcagtatccctatcccagtggctttccaccaatgggaggaggtgcttacccaccagcaccaagtgtcggctaccccggggctggaggctatgctacacctggaggttatccagcccctgggggctatcctgttagcccaagtccagggggtgttccagtctatccgggaggacaaggctttggagccccacctggtggagcaggcttttctggctatccacagccacctgcacagtcttatggtggtggaccagcccatgttccagtaccaggtggctttcctggaggacagatgccttctcagtaccctggaggacatgctccttaccctagccagcctgctgcgatgactcagggcacccaagggacaatcccgagcagcctccaactttgatgctatgagagatgcagaaattctccgcaaagcaatgaagggatttgggacagatgagcaagcaattgtggatgttgtgtccagccgttccaatgaccagaggc

SEQ ID NO: 3983 - DNA, 579 bp, Cricetulus griseus; identical to SEQ ID NO: 341

SEQ ID NO: 3984 - DNA, 579 bp, Cricetulus griseus; identical to SEQ ID NO: 342

SEQ ID NO: 3985 - DNA, 665 bp, Cricetulus griseus; identical to SEQ ID NO: 343
  misc_feature (565)..(565): n is a, c, g, or t

SEQ ID NO: 3986 - DNA, 600 bp, Cricetulus griseus
cagctgggagacaaattggactcattcattcagccaccagagtgcagtagtaacgatggtgtggagctccggcagcggagcagaggtgacccgacagcaggctcggcccagagggcttctcaccatggcctagaacagtacctgtccagatttgaggaagcgatgaaactgcgcaagcagctgatcagtgagaagcccagccaggaagatggaagtacaacagaggaattcgactcttttcgaatattccgattggtggggtgtgctcttcttgctcttggcgtcagagctttcgtctgcaaatatttgtctatattcgctccatttcttactttgcaacttgcgtacatgggactatacaaatattttcccaagggtgagaagaagataaagaccacagtgctgacagctgcgctgttgctatctggaattcctgctgaagtgataaatcggtccatggagacctatagcaaaatgggtgaagtcttcactgatctctgtgtctactttttcacttttattttttgtcatgaactgcttgattattggggttcagaagtaccctgaaacctgaagaactgagaacaagtttacaaagtg

SEQ ID NO: 3987 - DNA, 495 bp, Cricetulus griseus; identical to SEQ ID NO: 345

SEQ ID NO: 3988 - DNA, 600 bp, Cricetulus griseus
  misc_feature (153)..(186): n is a, c, g, or t
acatggagaaaaggacttcactgaggatgtcaactctgcttttgagttcctgttgaagctcacgcccttgttggacaaagctgaccagcgctgcaattgtgactgcacaaatttcctcctccaagaatgcaacaagcagggacttctgtctgnnnnnnnnnnnnnnnnnnnnnnnnnnnnnnnnnnaacagatcgggacccccagctaaaatcatcagaaaatgccaacatccagcctaaccctgggctgatcctccgggcagagcccaccgtcacaaacattctcaagacgatggatgcagaccactccaagtccccagagggactgctgggggtcctgggacacatgctgtccgggaagagcctggacttgctgctggctgssgckgctgccactgggaagcttaagtcctttgcccggaaattcatcaaggcaggagctgcagctgatctcacttctgccacagccaccgctacctcttcggaagggccaggaaggagggtgaggctgtgccatgaaacctcacccagtagctgccgagaacccccgcaacccctcatcgctggagccggagatgggagaagaagagtaacagagag

SEQ ID NO: 3989 - DNA, 600 bp, Cricetinae gen. sp.
tccgcagccatgagtatgctcargctacagaagaggcttgcctctagcgtcctccgttgtggtaaaaagaaggtctggttggaccccaatgagaccaatgaaatagccaatgccaactcccgtcagcagataaggaagctgatcaaagatgggctgatcatccggaagcccgtgactgttcattcccgggcccgatgccggaaaaacactttggctcgacggaagggcaggcatatgggcatagggaaacggaagggtactgccaatgcgagaatgcctgagaaggtgacctggatgcgaaggatgcggatcctgcgtcgacttctcaggagataccgggaatccaagaagattgaccgccacatgtaccatagcttgtacctgaaggtcaaagggaatgtsttcaaaaayaagcggattctcatggagcacatccacaarctgaaggcagacaaggcccgcaagaagctcctggctgaccadgctgargctcgcaggtctaagaccaakgaagcacgaaagcgccgkgaggarcgyctccargccaagaaggaggagatcatcaagactctgtccaakgaggaagagaccaagawataa

SEQ ID NO: 3990 - DNA, 600 bp, Cricetulus griseus
ccaagctggtcattgtcacagcgggggcccgtcagcaasagggagagagccgactcaatctggtccarcgaaacgtgaacatcttcaagkksatsattcccaacgttgtgaaatacagtccagactgcaagctgcttattgtttcaaacccagtggatatcttgacctacgtggcttggaaaataagtggctttcccaaaaaccgagttattgggagyggctgcaatttgsatyctgcycgatyccgttatctgatgggagaaaggttgggtgytcacccactaagctgtcatggatgggtcctakgggagcatgsagactccagtgygcctgtgtggagkggasygaatgtagcyggtgtctccctgaagaatctsaatccagagctgkgcactgataccgacaaggagcagtggaatgasgttcacaascaggtggttgwcagygcctatsargygatcmmwcygaasggttatacatcctgggccattggtctgtctgtggctgacttggccgagagcataatgaagaatcttaggcgggtgcatcccatttctaccatgattaagggtctctatggaatcaaggatgatgtcttcc

SEQ ID NO: 3991 - DNA, 581 bp, Cricetinae gen. sp.; identical to SEQ ID NO: 349
  misc_feature (471)..(489): n is a, c, g, or t

SEQ ID NO: 3992 - DNA, 483 bp, Cricetulus sp.; identical to SEQ ID NO: 350
  misc_feature (345)..(345): n is a, c, g, or t

SEQ ID NO: 3993 - DNA, 532 bp, Cricetulus griseus; identical to SEQ ID NO: 351

SEQ ID NO: 3994 - DNA, 600 bp, Cricetinae gen. sp.
ctgccgagcttccagcgcctcgggacgcgatgaggacctgggcttgcctgctgcttctcggctgcggatacctcgcccatgccctggccgaggaagccgagataccccgagagctgatcgagcggctggctcgaagtcagatccacagcatccgggacctccagcgactcttggagatagactccgtagggrctgaggatgccttggagacaagcctgagagcccacaggtcccaygccattaagcatgtgccsgagaagcggcctgtgcctattcgcaggaagagaagyattgaggaagccatycctgcagtttgcaagaccagracggtcatttacgagatacctcggagccaggykgaccccacatcggccaacttyctgatttggccyccrtgtgtggaggtkaarcgctgcaccggctgctgcaataccagcagygtcaagtgccagccctcaagggttcaccaccgtagtgtcaaggtggccaaagtggagtatgtcaggaagaagccaaaattgaaagaggtccaggtgaggttagaggaacacctggggtgtacatgtgcgacctccaacctgaacccagaccatcgggagg

SEQ ID NO: 3995 - DNA, 502 bp, Cricetinae gen. sp.; identical to SEQ ID NO: 353

SEQ ID NO: 3996 - DNA, 623 bp, Cricetinae gen. sp.; identical to SEQ ID NO: 354
  misc_feature (525)..(543): n is a, c, g, or t

SEQ ID NO: 3997 - DNA, 547 bp, Cricetulus griseus; identical to SEQ ID NO: 355

SEQ ID NO: 3998 - DNA, 466 bp, Cricetulus griseus; identical to SEQ ID NO: 356
  misc_feature (291)..(307): n is a, c, g, or t

SEQ ID NO: 3999 - DNA, 565 bp, Cricetulus griseus; identical to SEQ ID NO: 357
  misc_feature (96)..(110): n is a, c, g, or t
  misc_feature (216)..(241): n is a, c, g, or t

SEQ ID NO: 4000 - DNA, 496 bp, Cricetulus griseus
gcggtagcagcttcggcgtccgcggtttagtcgccaacatgcagctctttgtgcgcgcccagggtactacacacactcgaggtgaccggccaagagacggtcgctcagatcaaagctcatgtggcctcactggaaggcatttccccggaagatcaagtcgtgcttttggctggctcgccgctggaggatgaggccaccctaggccagtgtggcgtagaggccctgactactctggaagtagctggtcgcatgttgggaggtaaagttcatggttccctagctcgtgctggaaaagtgagaggtcaaactcccaaggtggccaaacaagagaaaaaaaagaagaagacaggtcgggccaagcggcggatgcagtataacccgtcgctttgttaacgtggtgccaacctttggcaagawkaarggccctaatgctaattcctaagtccttctgtgattcttgcactctaataaagccactttgcccaraaaaaaaaaa

SEQ ID NO: 4001 - DNA, 600 bp, Cricetulus sp.
atgggcgcacaccaactccagaggagctgccgccctgctacgagggcacagactggtcaggctgcacgctgcaggagttcatggattgcccttacaacctggccaacaaccggcaggtgcgcatgctggctgacctcagcctggtgggctgctacaacctgtccttcatccccgagagcaagcggscscagctgctgctggagagcgccaagaagaacctgcgcggcatggccttcttcggcctcaccgagttccaacgcaagacgcagtacctatttgagcggacgttcaaccttaagttcatccggcccttcatgcagtacaacagcacgcgggcgggcggtgtggaggtggatgaggacaccatccggcacatcgaggagctcaacgacctggacatgcagctgtatgactatgccaaggacctcttccagcagcgttaccagtacaagaggcagctggagcgcagggagcagcgcctgcgcaatcgcgaagagcgcctcctgcatcgctccaaggaggcactgccacgggaggacacggaagagccaggtcgcgtgcccaccgaggactacatgagccacatcattgagaagtggt

SEQ ID NO: 4002 - DNA, 594 bp, Mesocricetus auratus
taggcagaggcgggcgagtctctgtgagtttgaggccagtctggtatacaaagcaagttccagaacagtcgcaggtacacagagaaaccatgtctctaaaaacacacataaaacaaaacaaacaataaagaaaagtgtctctacctcttaatcatgaactatcaatatctccccagctaggggtaggggctcatgaccccctccacttccatgctggaatgttaattgagcaggtattatgaagtcttgtgaagacagccacagatgctgtgagtaggtgagtgtagtggtcctgtcctgtctaaaagacactgttagttgaggagatttcacttaaaatcttctcctcatatatgcaagaaaatattctaggaaacgtatttgactggataagatttatttgtctggactattcacctttgtggagttattggatgtatattataaaaggtggaggaaaagttgttaatcaccatcaagcaatgactatcttttttatcactattataggcactgctataaactttgcaaggttttgcattggattggatttcatatactgccttttcagtagcacccaaacttcttactagt

SEQ ID NO: 4003 - DNA, 1400 bp, Mesocricetus auratus
acagcgctatggagatgtgttcagcctgcagatggcctggaagcctgtggtggtratcaatggactgaaggcagtgcgggaagtgctggtgaactgtggagaggacaccgctgaccgycctccagtgcccatctttaatcacstgggytwcsggcmyaamtctcaaggtgtggyrtttgcacgttatggaccccagtggagagagcagcgtcgattytstgtgtctaccatgcgagacttcggcgtgggcaagaagtcactggarcagtgggtgacagaggaggctggccacctctgtgacgcyttcacccaggaggctggrcatccctttaatcccaycaccctcctgaataaaagtgtatgcaatgtgatttcatccctyatttatgcccatcgcttcgactatgaagaccctttcttcaacaagctgctcaaraygttacaggaaagytttggagaggacwctggcttcattgctgaggtgctgaacgcagtcccagtgctgcttcggatccctgggctgccaggcaaagccttccccaagctaaccgcattcatggattccctatataaratgytgattgagcacaagacaacctgggatcctgcacagccaccccgaggtctgacagatgccttcctggctgaggtggagaaggccaaggggagacctgagagcagcttcaatgatgagaacctgcrtrtggtggtrgctgacmtgttcattgcaggratggtgaccacstcaaccacactgtcctgggccctgctattgatgatcctgcacccggatgtgcagagccgygtscaacaggaaattgacgatgtcatagggcaggtgcggcgtccagagatggcagaccaggcccgcatgccctacaccaatgctgtcattcacgaggtgcagcgattcggrgacattgccccagtgaatrtaccacatatgacatcccrtgatgtcgaagtacagggtttcctcatccccaaggggacgaccctcatccccaacctgtcctcagtgctgaaggatgagactgtctgggagaagcccctccacttccatcctgaacacttcctggatgcccagggccgctttgtgaagcasgaggccttcatgccattctcagcaggccgcagagcatgtctgggggagcccctggcccgcatggagctcttcctcttcttcacctgcctcctgcagcgctttagcttctcggtgcccgctgggcagccccggcccagcgaccaaggcrtcttcgccttgcctgttaccccgaccccctacgagctctgtgcagtcgtgcgctagcaaggacagcagctccatcctcctccccagctcgtgctgcgtgatgtccaataaaccagacctgtggctgtcamwmaraaaaaaaaaaaaa

SEQ ID NO: 4004 - DNA, 600 bp, Mesocricetus auratus
cccagatgtgcagcgccgagtccaacaggagatcgatgacatcttaggaccggggagaagcccagagatggcagaccaggcccgcatgccctacaccaacgctgtcattcatgaggtgcagcgctttgcagatattgccccactgaacttgccatgcatcacatcccgggacattgaagttcagggattcctcatccccaaggggacgaccctcatcaccaacctgtcctcagtgctgaaggacgagaccgtctgggagaagcccctccatttccatcctgaacacttcctggatgcccagggctgctttgtgaagcaggaggccttcatgccattctcagcaggccgcagagcatgtctgggggagcccctggcccgcatggagctcttcctcttcttcacctgcctcctgcagcgctttagcttctcggtgcccgctgggcagccccggcccagcgaccatgtagtcttaggtgttttgaaaagcccagccccctaccagctctgtgcagttcctcgctagcaggacaccaattcaatccaccctagctttgtctgatcctcccacagtaaaacagttttgtgactgtcaaaaaaaaa

SEQ ID NO: 4005 - DNA, 1400 bp, Mesocricetus auratus
  misc_feature (36)..(51): n is a, c, g, or t
  misc_feature (245)..(273): n is a, c, g, or t
  misc_feature (385)..(410): n is a, c, g, or t
caagactctctaaacaggtcgaccttgctgagttcnnnnnnnnnnnnnnnncctgtgactcagcacctgagctgcatgctgcaggaacgcctgcatctggggcagcggcagctgcagcagcacgaaactcaggcagcggagccccagcagcagctgggtcatcagacggcgccccagcaagagctgtgtcaccagacggcgccccagcaacagatgtgtcttcagatggcgccccagcaagagcnnnnnnnnnnnnnnnnnnnnnnnnnnnnnctgtgtcttcagatggcgccccagcagcagctgtgtcaccagacggcaccccagcaacagctgtgtcttcagatggcgccccagcaagagctgtgtcaccagacggcgcccnnnnnnnnnnnnnnnnnnnnnnnnnntcatgcgcaagtcaatggcatgtttgcaagttggaaccccacccctctcgtgcctttcagctgtcctcagcaggaactgaagcattatgacgtcttttcagacttgcagggggcgattgaggagttcccctacaaatctgagatggacagtatgccttacacacagagctttgctccctgtaatcagtctgtgctaccccagcgttccaagtgtgcacagctggacttgcctggaaagggtttcgaaccatccctgcaccccaacacttctaatgtaggagattttgtcacttgtttacaagttcccgaaaaccaaagacacgaggtgcatccacagtcggccatggtcgctcctcagacatactatgctggggccatgtccatgtaccagtgccagccaggacctcagcacgtccctgtagagcagatgcagtacagccctgcagtcccagactcccaggcatttctaaacaagtttcagaatcagggagtgttaaatgaaacctattcgtctgaattaaacagcgttggtcacaggcagaccactgctcatcttcatcaccctgcagaagggaggccgtttcctgatatcacacccagcggattcctgtagctttgggaacaagataccgggactgtctgtccatgttggccatcagcactctttttccaagccagattttaatctttgtgttgggaagaggagtttaaaaactgttatcggttacctataaaatgggaagctctgcagsagcatagggagagaccacaagcctttaagtagctttagcacctcagcgtgcacatgcccacarcggagagctttggggttctggagagctgagcgtctccactcagtgaccagccagaaagacaacttcaggattcccgatggtgtaccaaatacagttagaagactaattgattttaacctctctgtgtctcagatgttagaataaatggtttggtgcttttatcaaaaaaaaaaaa

SEQ ID NO: 4006 - DNA, 1277 bp, Cricetinae gen. sp.
tttcttctggaggcattccggaagacaaacggtgctctcattgaccccaccttctacctgagcagarcrgtctccaacgtcatkagctccatcgttttcggcraccgctttgactatgaggacmaagagttcctgtcrctgctgargatgatgmyrgraasyttccagttcacagsywcmtccactgggcagctctacgagatgttctcttcrgtgatgaarcrcctgccrggrccccagcaamargcctwtaaggrrctrmaggsrctggargacttcatarccaagaaggtggaacagmaycagmgcaccctggayycyaattccccaagggacttcatygactccttcctcatccrcatgmaggmggagaagaagaaccccaayacagarttytwcatgaaraayytggtgytrackacrctraacctcttckytgctggcacagagaccrtcagyacraccytacgctatggcttyctsytgctcatgaagcacccagaygtggaggccaaartccawgaggagatyracmrggtgattggcargaaccgrcagcccaaatatgaggaccgmwygaagatgccytacacagaggctgtgatycatgagattcarmgmtttgsagaydtratmcccatgggybtgsctcgaagggtcaccaaggacaccaagttycgggrcttcytyatycccaagggcactgamgtgtttcctrtgctgggctctgtgctgarsgacyccaarttyttctccaaccccaaagacttcaayccamagcayttyctdgatgrcaakrkkcagtttaagaagaatgatgcmttyrtrcccttttccwtaggaaarcggwactgcttyggagaaggactggckagaatggagctcttyctctwcctcacrawcatcctgcagaacttycrcytcagatccycacaggcaccccrdgacatcgatgtgtcccctmramtsgtgggrtttgsmacvmtyccaccaaactayaccatgagyttyttgtcccrttrakcmakgkctkgatrwkggwmaarggarkgatggagaccmgsytagtgtgggwvattgkrahttrgadggagtcakagggacargararacagaggacaygaatmracttgstgaagagagactgbcatttccaaggyagkgwgagagaaagrrgaaatktatactatgtkgtgaatartrayratrrtaatwataataatracastagmyaytaytwmtaktaataataataataaaataataatrgcgacatt

SEQ ID NO: 4007 - DNA, 1400 bp, Cricetulus griseus
acgtagcacttgttttcttccttctgagattcccccaaaatagttgcttcaatccgactgccacgagtcctgctgacgccttgagattcttttgggagcaggtccctgacccacgttcatctccgagccggatcactactccgcaagcctgagggaggaggcggaccttcgcgaacagagggcccctcctcggaggggagggaccgacacccagggccttgttctccagcagttgcagcgccgggtcccaggacttagtcctgcgccacggttctgaccacgggtggcccgctgcccagccggctctgcaagccggtggtccgcgtgtssmtccgatatgtcgtcctgcagccgcgtggcgctggtgaccggggctaacaagggcatcggctttgccatcacgcgtgagctgtgtcgcaagttctcgggggacgtggtgctcaccgcgcgggacgaggagcggggcaaggcggctgtgcagcagctgcaggcagagggcctgagcccccgcttccaccagctggacatcgacgacctgcagagcatccgcgccctgcgcgactttctgcgcaaggagtatgggggacttaacgtgcttgtcaacaacgcgggcatcgcctttagaatggatgatccaacaccctttgacattcaagctgagatgacactgaagacgaacttttttgccactagaaatgtctgcaatgagttactacccataatgaaaccacatgggagagtggtgaatgtcagcagtctgcagggctcaaaggctcttgaaaactgcagtgaagatcttcaggaaaggttccgatgtaacacacttacagagggggacctggtcgacctcatgaaaaagtttgtggaggacacaaaaaatgaagtccacgagagggaaggttggccagactcagcttacggggtgtccaagctgggggtgacagtcctttccagaatcctggcccagcagctgggtgagaagcgtaaagcagacaggattctgctcaatgcttgctgcccagggtgggtgaagaccgacatggcgagggaccagggctccaggactgtggaggaaggggcggaaaccccagtttacttggccctcctgcctccagatgccactgagcctcagggccagctagtctgtgacaaagtcgtgcaaacatggtgaacatctgctttgggacttaatggtttagtaactgytsgagagggakmcaaatggaggctgctgtagtttgattctctttgcacattgagaaggaaggtccgtcatacctgtgaggttctacaatctgaatctgaatgatgtgcaatgtccaaactctctatggcccttggtttttcatccagttcattgtgcctgcttgtttttcaaataaaaaaatagtttttatttt

SEQ ID NO: 4008 - DNA, 600 bp, Cricetulus griseus
gactatggacaaagatccaatctccaagttggggarggaaaacagtgcaacattgataaaagcacagagctgaagattcactcacaygggcaaggtcaatgtctsatttccgggtggacagctgcagcagcctctctgcagacttctcctgcagtctcccctggctggggcttccaaaacyccttgaggaaaaaagacagagatgcccatgagccgaccyagccmtttttctggctggattttaaytgtwcaacacgctttgcttgctctgagcctgcaaaggaactggcctgtttctttattgaacagatttatacacctaagcccgatatcagaaggtgakccatcaccgcgtaaatatacaccattaagacaagaggacagttacagggagtgtaaagctcacaagaacytgtccccgawttaccacgccctcctggaggcggggtcagatgatgcgcatgcgccttgagcccatgccggcttaaccaaacaagctgtccytagaaaaaccctaggagttaggattggctctcctcgtgcgcggggaacctcagrrtccgtgcyctgtaaccgcctcyctstgaacacccagccatg

SEQ ID NO: 4009 - DNA, 1400 bp, Mesocricetus auratus
gtgggaatcctgtacatgggcgggcagctggtggtcagaggggctgtcagcagtggagaccttgtctcctttgttctytaccarctgcagttcaccactgccgttcaggctctgctctcctactatccctggatgcagagggctgtgggctcctcagagaagatatttgaatacctggaccggagtccttgctctccgctcagtggctctttggcgcccttaaacatgaaaggtctygtcgagttccaagacgtctcctttgcctatccaaaccatcccgatgwccaggtgcttcaggggctgacgttcacgctgcatcctggaaaggtgacggcgttggtggggyccaacgggtcagggaagagtaccgtggccgccctgctgcagaatctgtaccagccgacggggggccagctgctgctggacggacagcccctggtccagtatgatcaccactacctgcacactcaggtggccgcggtgcaacaagagccactgctatttggaagaagttttcgagaaaatattgcctacggcctgacccggaatccaaccatggaggaaatcacagctgtggccaaggagtctggagcccacgatttcatccctggactccctcagggctatgacacagaggtgggtgagtctgggaaccagctgtcaggggggcagcggcaggctgtggccttggcccgagctttgatccgaaaaccgcgcctgcttatcttggatgacgccaccagtgccctggatgccaacaaccagttacgggtccagcggctcctgtatgagaaccccggaccggcttctccaaccgtgctgctaatcacccagcagctcagcctggtggagcaggcgcaccacatcctgtttctcgargaaggctcggtttgcgagcagggcacccacctgcagctcatggaaaagactggaggtcgctaccgggccatggtggaggctctcaaggctccttcagatggacaggcctctggacctgccgaccgccctccagcactgtcctctgctaggtgtggcggagaacccgggagcaaagatattatcacacccattgaccaggctcagttgaggaactgaggtactggtcacaggataaaatgtaacatctaggagacggctggagtttaccatgaatgctattcccaccccggccccttagwtagagtcgatttcaggtacctcaggctgaccttgaactcctgcctcccccctcctggtactgttctggtatcacagcacgggcaaacctggtttatgcggtgttggatgagaagaaatgctcacagtgaagcagtttgggattaacggaaggcataggctggcctatggataacccgtgrgctactgatatttataataaaactggcgttttgkactgcgtt

SEQ ID NO: 4010 - DNA, 600 bp, Mesocricetus auratus
acttcataggggaaatgcctgatgggatacacacagaaataggggagaaggggagccagttagccgtgggacagaaacaacgtctggccattgcccgggcccttgtgcggaacccacgggtcctgatcctggatgaggcgaccagtgccctggactcccagtgtgagcaggctctgcaggcctggcgatcgaagggggacaggacggtgctggtgattgcccacaggctgcacacggttcagaacgttgaccaggtgctggtgctcaagcaggggcagctggtggagcacagccagctcagggaggaccaggatgtctacgctcacctggtacagcagcagcggctggaggmrtgaggcctccgcacacagagccacccactgagtgctctcaggaccagacccacggggactgtgctggaggctggggtcgggataaagactgggaccatttcggactcttgtatgttttggtgggcttgagtgggtgagagttgggggatggggtggtcgctgggtggagtgagtgttttgtggttctagaaacattattattattttttgctgattatagtaaatatgtatagaaacgttttccctt

SEQ ID NO: 4011 - DNA, 600 bp, Cricetinae gen. sp.
aacagaccagtgtataccacttctcaacaagtcggaggtttggttacatatgtcctcagggaaatctacgaattgagaaaagagttgtgtaataacaaccctggctgtatggacaatgactatgtgttgttagaaaataatctggaacttccggtgatacaaakaaatgatggmtgcywccaaactggatacaattgggaaatttgcctaytgaaaatcacctctggtcttctggactaccagatctacytggagtttgtgacsaacaatgtacaagataacaagaaagacaaagcmagagtcattcagagcaccaycaaaaccctaagtcagatcttcaaacaagaggtaaaggrtccagataaaatagtcaygcctagcccracytccaaggccatcctratrgagaagctggagtcacaraagsagtggccaagraccaagaccatmraactcatcctgaaagcacttgaagaattcctagaagtcaccatgaggtctactcggcaaaactagtgtgctgtgccttagcataccgatctgtggacattcactgtggtcagaaaacatatcctgtcattggggatctaccttatgttg

SEQ ID NO: 4012 - DNA, 583 bp, Cricetinae gen. sp.; identical to SEQ ID NO: 370
  misc_feature (148)..(168): n is a, c, g, or t

SEQ ID NO: 4013 - DNA, 469 bp, Mesocricetus auratus; identical to SEQ ID NO: 371

SEQ ID NO: 4014 - DNA, 138 bp, Mesocricetus auratus; identical to SEQ ID NO: 372

SEQ ID NO: 4015 - DNA, 138 bp, Mesocricetus auratus; identical to SEQ ID NO: 373

SEQ ID NO: 4016 - DNA, 138 bp, Mesocricetus auratus; identical to SEQ ID NO: 374

SEQ ID NO: 4017 - DNA, 138 bp, Mesocricetus auratus; identical to SEQ ID NO: 375

SEQ ID NO: 4018 - DNA, 1062 bp, Cricetinae gen. sp.; identical to SEQ ID NO: 376

SEQ ID NO: 4019 - DNA, 600 bp, Mesocricetus auratus
ttgaagattttgaaagaaaagccagggaagtgtgtgataacttggagagcttcacttcaggcagtcctttcctatgcatggatctcagttacatcacggctttattaaaagatggctttggttttgcagatgggacccttttacagctcacaaagaaagtgaacaacatagagacgggctggcctgggggccacctttcacctgctgcagtctctgggcatctccagctgaggctcagcgtgcccttggaaacctgcacttctgaacttctttttacaggaaggagaggactcgggcattttctgcaactacgctggcgaaagcctggcctgaaacccattgactggctttattaggagggagggggtttataatgagtgttgccccttgagcctagtgatttggtcttaatcagttttgcacatctaatgtgaacagctccctaaccacttggcaggtgcacagctggtgccagagtacaaatcttttgagattctttgtatgtcacagagtctgtgaagaaaaaagagtaggtttggaactccatgttagattgcgagttcagagatgggtcattgggaaccaaagaaaaatctcatt

SEQ ID NO: 4020 - DNA, 219 bp, Cricetinae gen. sp.; identical to SEQ ID NO: 378

SEQ ID NO: 4021 - DNA, 1282 bp, Cricetulus griseus; identical to SEQ ID NO: 379

SEQ ID NO: 4022 - DNA, 600 bp, Mesocricetus auratus
ccttaggttggctctgactgtaccaccatccactataactacatgtgtaatagttcctgcatggggggcatgaaccggcggcctatcctcaccatcatcacgctggaggaccccaggtaggcagcctcttgctgtgttcctgttggcgtgttcctccccagtctgtctctggtccatgccccacccgctgccacatgcctaccctttagctcttgctccgcctgcatacatgaagtctctggtttactcacatttggagtaggaccagagttcttactgtctcgtgctctccctcctctcaccctgggtagtgggaacctgctgggacggaacagctttgaggttcgtatttgtgcctgccctgggagagaccgtcgtacagaggaaaaaaatttccaaaagaagggagaaccttgcccagaactacccccaaagagtgctaaacgaggtaagcaggtgagacaaagagggcagaggaggaggttcagcttcaccggggaaatttactctctttcctttttcacagcattgcctaccaacacaagctcctctccccagccaaagagaaaaacacttgacggagaatatttcacccttaag

SEQ ID NO: 4023 - DNA, 600 bp, Cricetulus sp.
catcgagtatgtraagactttggrgtaatagcaacctttgacyccaagcccattcctgggaactggaatggtgcaggctgccataccaactttagyaccaagrccatgcgggaggagaatggtctgaagcacatcraggaggccatygagaaactaagcaagcggcaccggtaccayattcgagcctacgatcccaaggggggsctggacaatgcccgtsgtctgactgggttccacraaacgtccaacatcaacgacttttcwgctggygtcgccratcgcagtgccagcatccgcattccccggactgtcggccaggagaagaaaggttactttgaagmccgcygcccctctgccaattgtgacccctttgcagtgacagaagccatcgtccgcacatgccttctcaatgagactggcgacsagcccttccaatacaaaaactaattagactttgagtgatcttgagcctttcctagttcatcccaccccgccccagctgtctcattgtaactcaaaggatggaatatcaaggtctttttattcctcgtgcccagttaatcttgcttttattggtcagaatagaggagtcaagttctt

SEQ ID NO: 4024 - DNA, 600 bp, Cricetulus griseus
gttccttggcctgaggagtaaggtaggcccaggtgtggggctcttaagtcatgtctgaggcaggtgtgcacaagtttgaggtcttgttccgccagcatctgaggagattgggttgggaactggtatgcatgtcaccatctgaggtttagcccagatcgggagtcctcttcatcagcattgagaaagtagagactggcacaggtcataatgaggtgggtcaagcatggatatgaggccctggttctgccatcaccgagacggcaaaggctagcayaggtatgagactkccttcctgccagtgctgaggaamtgggagccwacagaggtttgaggccttgggtctgccaggaagaaaaggccagctgcggtaacatctttgatttgacgcgtccctcacgtagtctgccttgctggccagcatgragagtcactagttcctggatctgctgtctgaactgggmagagtcgggttgggtccagccctccaggctgttacctgtggaagattggctttctggggacaggtgtggcaggagggaggggggtagggtgtgcctgccctcctccagtgccgtttccttctctcctagtgggtaggtg

SEQ ID NO: 4025 - DNA, 790 bp, Mesocricetus auratus; identical to SEQ ID NO: 383

SEQ ID NO: 4026 - DNA, 600 bp, Mesocricetus auratus
ctcctgtttgctcctaatttgctcctggacaggaatcagggcaagtgtgtggagggcatggtggagatctttgacatgttgctggctacatcagctcggttccgcatgatggacctgcagggagaggagtttgtgtgcctcaaatctatcattttgcttaattctggagtgtacacatttctgtccagcaccttgaagtctctggaggagaaggaccacatccaccgggtcctggataagatcacagacactttgattcacctgatggccaaagctggcctgacactgcagcagcagcatcgtcgtctggcccagctcctcctcattctttcccacatccggcacatgagtaacaaaggcatggagcacctctacaacatgaaatgcaagaacgttgtacccttctatgacctgttgctggagatgttggatgctcaccgcctgcatacccccgtcagtcgcatgggggtctccccagaggagcccagtcagagccagctgaccaccaccaactccacttcatcacattccttacaaacctactacatcccgtcggaagcagagagtttccccaacacaatctgagacctcccaggctcc

SEQ ID NO: 4027 - DNA, 300 bp, Cricetulus griseus
agccagcctctggcctccaagcaggagaaggacgggactgagaagcgaggccggggtaggccacgcaagcagcctccggtgagtcctgggacggcgctggtagggagtcagaaggagcccagtgaagtgccaacaccgaagagrcctcggggccgaccaaagggaagcaaaaacaagggcgctgccaagacacggaaagctaccacagctccagggaggaaaccaaggggcagacccaagaaactggagaaggaggaagaggagggcatctcccaggagtcctcggaggaggagcagtga

SEQ ID NO: 4028 - DNA, 600 bp, Cricetulus griseus
actcacaaagaacggcagcactcagataccatggtgttcctttacctgtgggtggtcttttgtgccatcagttcctgctacaccctcatctgggatctcaagatggactggggtctcttcgataagaatgcaggagaaaacactttcctccgggaagaaattgtataccctcaaaaggcctactactactgtgccatcatagaagatgtgatactgcgctttgcttggactatccaaatctctattactgctacagcttttcagcctcatgttggagacatcattgctactgtctttgctccccttgaggttttccgacgatttgtatggaacttcttccgtctggagaatgagcatctaaataactgtggtgaattccgtgctgtgcgggacatctctgtagccccactgaatgcagatgatcagacactccttgagcagatgatggaccaggaagatggggttcgaaaccgccagaagaatcggtcatggaagtacaaccagagcatatctctgcgccggcctcgccttgcatcccaatccaaggctcgagacactaaggtattgatagaagacacagatgaygaagctaacacttga

SEQ ID NO: 4029 - DNA, 477 bp, Cricetulus griseus; identical to SEQ ID NO: 387

SEQ ID NO: 4030 - DNA, 597 bp, Cricetinae gen. sp.; identical to SEQ ID NO: 388

SEQ ID NO: 4031 - DNA, 600 bp, Mesocricetus auratus
caagaccatcatcaccaccaagagcaggtggggaggcttccgtcctcctcctcatcccatccaggtcagctgcagcctcagcagcccagagcctcttgatctcctggcactatggttcgttaccgaatgaggagccccagtgagcgtccgcaccaggggcctgggcaagaacatggacgtgaagagcaagggcaggggcaagggttgagcccagagcgtgtggaggactatgggaggacacacaggggccaacaccaccacagacgtcgctgctcgcgtaggaagctgtaccgaatccacaggaggcgccggtcatgcaggaggcggaggagacactcctgccgtcacaggagacggcatcgcagaggctgcagaagatcacscargassmssagayscmkggcmrsmkgtgtwgswgkcccmccatctaaaccctgctgcctcccaggtagcctagcaaaccagaactttccttcccaaaggctgcagaagatcacgcaggaggaggagatgcaggtgcaggaggtgtaggaggcaccaccactaagcctccccaggccgtccatcctgtttggagccaaggaaatcacccgcccaagg

SEQ ID NO: 4032 - DNA, 420 bp, Cricetulus griseus; identical to SEQ ID NO: 390

SEQ ID NO: 4033 - DNA, 600 bp, Cricetinae gen. sp.
ackcctcccactttggkaaacaggatctcagctggcttaatgacyggaggtgtggcrgtattcatygggcaacctacygaggtygtgaaagtcagactccaagcacagagccacctacacgggatcaaaccccgctacackggkacctacaatgcttayagaattatagccacaacagaaagcytktcaacactctggaaagggacracccctaayctgttgaggaatgtcatcatcaactgtacagagctggtaacatatgacctcatgaagggggcccttgtgaacaaccaaataytggcagatgacgtgccatgccayttactgtcagctyttgtcgcyggsttttgcaccacattcctggcctctccagcagatgtggtaaaaacaagattcatcaactctctaccaggacagtacccaagtgtacccagctgygcaatgaccatgytcaccaaggaaggaccaacagcttttttcaaagggttygtgccttctttcctgcgrctsgcrtcctggaatgtcatcatgtttgtgtgctttgaacagctgaagaargagytgwykaagtcgaggcagacggtggactgcaccacataa

SEQ ID NO: 4034 - DNA, 1021 bp, Cricetinae gen. sp.; identical to SEQ ID NO: 392
  misc_feature (265)..(279): n is a, c, g, or t
  misc_feature (389)..(404): n is a, c, g, or t
  misc_feature (775)..(802): n is a, c, g, or t

SEQ ID NO: 4035 - DNA, 600 bp, Cricetulus griseus
attgccagtcattgcagcgcagcaaacaccccagtggtgggcctgaagtatacgtcttgctcttcaactccacgggtgacagggactctgctgccctgctgaagttgctgcagccctgccagtttgactacgctgtcttttgccccaacctgacggaggtgtcatccacagaaaatgcagaccagcagaacttcacagtgactctggaccaggtgctgctccgctgcctccaacaccagcaacactggagctgcctgagtgagaaacaagccagccctgacttcctgagcagccccagcccagagcctggcaggccaggttccctgcagccggcactgcgcccgcctcactctacgggcactaactcccttgtctttagctgtatctcccacgccttgcagtggatcagccaaggccgggatcccatctttsaggccccaagccctccaaggagcctcctcagccaccccacggccagtagtggggcaagcattctccgggaggctggtgccatccatgtactggttactggaagcctgcacctggtgggtggagtcctaaagctgctagagccctccctgtcccagtagccaaggacca

SEQ ID NO: 4036 - DNA, 474 bp, Mesocricetus auratus; identical to SEQ ID NO: 394

SEQ ID NO: 4037 - DNA, 558 bp, Mesocricetus auratus; identical to SEQ ID NO: 395

SEQ ID NO: 4038 - DNA, 379 bp, Cricetulus griseus; identical to SEQ ID NO: 396

SEQ ID NO: 4039 - DNA, 408 bp, Cricetulus griseus; identical to SEQ ID NO: 397
  misc_feature (323)..(337): n is a, c, g, or t

SEQ ID NO: 4040 - DNA, 600 bp, Mesocricetus auratus
ccagaactccagccggtgcctatgcctcagcctcttctccttcctgcttgtggsaggggccacaatcctcttctgcctgctgaacttcggggtgatcggcccccaaagggaagagaagttccccaaccctatcatcggctccatggsccagacactcacactcagatcatcttctcaaaattcgaacgacaagcctgtggsccacgttgtagcaaaccaccaagtggaggagcagctggagtggctgagccatcgtgccaatgccctcctggccaacggcatgtctctcaaagacaaccagctggtgataccagcagacgggctgtacctggtttactcccaggttctcttcaggggccaaggctgccccagctacgtgctcctcacccacactgtcagccgcattgctgtgtcctacgaggataacgtcaacctcctgtccgccatcaagagcccctgccccaaggaaacccctgagggggaggagctcaagccctggtacgagcccatctacctgggaggggtcttccagctggagaaaggtgaccgactcagtgccgaggtcaacctgcctaaatacttagactttgcagaatccgg

SEQ ID NO: 4041 - DNA, 571 bp, Cricetinae gen. sp.; identical to SEQ ID NO: 399

SEQ ID NO: 4042 - DNA, 600 bp, Cricetulus longicaudatus
gctggaacctacccagcctgtctgctttctaggaatctctaggtctctgcttagagaatggccttctaggaacttccttgggccttcgtgatcctggtaagacctgggttagaggactaggccacatccataaacatttgggtatcttgcctcagtgcataccagcaggtggcctcataagccatgagacttggacaccagggtgctgctcacagattagggaagaggccatcctcaagcagttccctgtgccactggaaagaaaactaggaaagtggccttttcctgtatttatcggatggcccttgctctgatggcctatccttgctgaagcagaaagtgcagagattccccagttggctacagccttgtcccacctctgccacttctctcccatactctttctaatgacctctcagttctgaaaggatttgggagggatccagtagtaaaacctaggtggctaaatcccttgcatttcagggcagacatggactatgtccccatagtcattccccaaatcccataggctggtatcaactctggaaatccataggtcctttcccagtttgttgagcaaataagtacagaaccagaatg

SEQ ID NO: 4043 - DNA, 600 bp, Cricetinae gen. sp.
gagcagatggtagactcragcaaacctgagctgctctatcgaacagacttttttcctggccttggctggctgctgwtggctgagctgtggrcagagctggagcccaagtggcccaaggccttctgggaygactggatgcgyagacctgagcagcggaaggggygggcctgtattcgtccagaaatttcwagaacgatgacctttggccgyaaggrtgtgagccatgggcagttctttgaycagcatcttaagttcatcaagctgaaccagcrgttcgtgtctttcacccagttggayttgtcrtacytgcagcgggaggcttatgaccgggatttccttgcccgtgtctatrgtgccccsctgctacaggtggagaaagtgaggaccaaygatcagaaggagctgggggaggtgcgggtacagtacackagcagagacagcttcaaggcctttgctarggccctgggtgtcatggatgacctcaagtctggtgtccccagagctggytaccggggcrttgtcactttccagttcmggggycgrcgtgtccacctggcacccccacrwwcctgggaaggctatgatcctagctggamttag

SEQ ID NO: 4044 - DNA, 600 bp, Cricetulus longicaudatus
agcaacccaacgcccgctgtgcaccgggacatggctgccaggacatcgccactaaggcccatagtcgccaccactgggcctacccttagccccgtgccacctgtggtccacctgaccctccgccgggctggggatgacttctcccgtcgctaccgtcgcgacttcgcggagatgtccagtcagctgcacctgacgcccttcaccgcgaggggacgctttgctacggtggtggaggaactcttcagggatggggtgaactgggggaggattgtggccttctttgagttcggtggggtcatgtgtgtggagagcgtcaacagggagatgtcacccctggtggacaacatcgccctgtggatgaccgagtacctgaaccggcatctgcacacctggatccaggataacggaggctgggacgcatttgtggaactgtacggccccagtgtgaggcctctgtttgatttctcttggctgtctctgaagaccctgctcarcctggccctggtcggggcctgcatcactctgggtacctacctgggccacaagtgaggtccacagacctgctccccaaaatatgcaaaaggttcactaaagcagtag

SEQ ID NO: 4045 - DNA, 310 bp, Cricetinae gen. sp.; identical to SEQ ID NO: 403

SEQ ID NO: 4046 - DNA, 257 bp, Mesocricetus auratus; identical to SEQ ID NO: 404

SEQ ID NO: 4047 - DNA, 600 bp, Cricetinae gen. sp.
gaggtggtgaccytgtggtaccgagcacctgaaatccttctaggctgcaagtactactccacagccgtggatatctggagyctgggctgcatcttcgctgaaatgcacctagtgtgtacccagcaccatgctaagtgctgtggggaacacagaagaaatggaagacacagtctctgcccgctgtgctcctatctagaagtggctgcgtcacaaggaggggggatgaccgcagtgtctaccccataccccgtgacccggcgggccctgtttccyggagattctgagatygaycaactcttccggatcttycgractctggggaccccwgatgaggtggtttggccrggagtyacttctatgcctgattataagccgagtttcccsaagtgggctcggcaagattttagcaaagttgtgcctccactggatgaagatggrcggagcytgttatcgcaaatgctgcactatgaccccaacaagcggatttcagccaaagcagccctggcccaccctttcttccaggatgtgactaagccagtaccccaccttcggctgtgatgtccttcccaaagccctcctcacccttgggtcttgacttga

SEQ ID NO: 4048 - DNA, 1398 bp, Cricetinae gen. sp.
aagcctggtgatgtcatccactatgtgttggacagacgccggacgctaaatatttcccatgatctgcacagcctcctgcctgaagtttcaccaatgaaaaaccgcaggtttaagacctgtgctgttgtyggraaytcyggyattctactagacagtgratgtggcaaggagattgacagtcacaattttgtaatcaggtgyaatctagctcctgtggtggagtttgctgcggatgtggggactaaatcagattttattaccatgaacccatcagttgtgcaragagcatttggaggctttcggaatgagagtgacagagmaaartttgtgcatagactttccatgctgaatgacagtgtcctttggatccccgctttcatggtcaaaggaggagagaarcacgtggaatgggttaatgcattaatccttaagaayaagctgaaagtgcgaactgcctatccatcaytgagacttattcatgctgtcagaggttactggctgaccaacaargtgcccatcaaaagacccagcacaggcctyctcatgtacacactggccaccagattytgtgatgaaattcacctgtatgggttctggcccttccctaaggatttgaatggaaaagcygtsaaataycattactacgatgacttraaatatagatacttttccaacgcaagccctcacagaatgccrttagaattyaaaacmctgaatgtgctacacaacagaggagcrctaaarctgaccacaggkaagtgcatgaagcaataaagcacatattgaaggatcaaaactggatagaaactttttctaaagatgcttctggagatttagaaacaggatccaaaacaaggctggggttcagcatccacactgactgaatagctgaaatggaagtccatgggaatccaccaccagctgatgaaatacctgccaagtgctctaactataaaatattctgacttcaagggtcctagtaagtgccacttccacgaagaatacagtttgaatgtattatcagtagtgtttacaagatccaacagtgcactcatcattaattagcaaagcaaatatgttcgtcactgtggggcagccgctgtaatgccaagcacactggaagaggaactcaggagcatcacgactcggagcttgggaaattaacatccttatccgcagaaatgaagaagaaaaagaattcaaacagtgaaatccatgagatgaagtaacttgaaggaatgtcttcagtcaggacactgagagtgatcatgtgtgtgttttgcttgtgtttttgtttgtcttctgaaacttgttttcttttgggtatggggtgaatagaaattcatctgaggtacagaaatgggaaatacatgacagagaaaaataaacatcaaacag

SEQ ID NO: 4049 - DNA, 477 bp, Mesocricetus auratus; identical to SEQ ID NO: 407

SEQ ID NO: 4050 - DNA, 600 bp, Cricetinae gen. sp.
cccatcctctagcacatttcccctcgttactcgttgctagatgttcactgtccccagggttgtctacaaccgcagctctgggcaygtgtccaatgctcctggtgtacagatccgygtccctggctttggcaagayctaytctgttgagtacttagaygacaacaagctagcaggtgtgtctactcagggaaaggaaggggctcttggcatcatgctggccatacaagtatgatggacagagattcctatatggctgcctccacaggctacatgcacacactggtacagaatctggttaacaatgggtatgtgccggatgagacagtgcgggccgcaccctatgactggcgtctggaacccagtgagtgtttacaggtggtgggctgggggcatgacaggtggtcccagactctcattgcttctgacctatctcgcccatctccagggcagcaggatgaatactaccggaagctdgcaggactggtagaggagatgtatgcygcytatgggaagcctgtcttccttrttgggcacagccttggctgcytacatgtgctctacttctkactgcgtcacgctcagtcctggaagcacacattc

SEQ ID NO: 4051 - DNA, 471 bp, Cricetinae gen. sp.; identical to SEQ ID NO: 409

SEQ ID NO: 4052 - DNA, 561 bp, Cricetinae gen. sp.
  misc_feature (35)..(53): n is a, c, g, or t
aaaaaatgagacaacattggcatggctttgttttnnnnnnnnnnnnnnnnnnnggttttttaaaattttttttaaaaaaggttttgttttggcgcttttgactcaggatttaaaaactggaacggtgaaggcgacagcagtcttggagcaagcatcccccaaagttttacaatgtggctgaggactttgattgtacatttttttttcttttttaagtcattccaagtacccatgagatggctacaggaagtccctcaccctcccaaaagccaccccaattccctagaggaggatggctgagtccatgccctgagtccacactggggaggtgacagcattgcttctgtgtaaattatgtactgcgaaaattttttttaaatcttccgccttaatacttttttagttttgtttttatttttgaatggtcagccatcgtgaccctcatgggtgtttttttttgtccccccaacttgagtatgaaggctttggtctcccctgggagtgggttgaggtgttgaggcagccagaggggcttgcctgtacactgacttgagaccagtt

SEQ ID NO: 4053 - DNA, 283 bp, Cricetinae gen. sp.; identical to SEQ ID NO: 411

SEQ ID NO: 4054 - DNA, 600 bp, Cricetinae gen. sp.
aaggcctttctgctcagtggggtggatgarctggagcakagaagggatgaaataatyrgctaystctgygacctwgcccctgagcccmgagcccctactaagcstccycaggyagcwcraatcaccacargyccagggacyttkgsrrtktcatcrcctggacccaagaggaagtccatggttctggaygtggtgtttgtcctggaggggtcbgayraagtkggygaagcyarcttcaataagagcaaggarttcctggaggaggtratwcrgcrcatggatgtsmgycaggatggyayccacatytcvgtgctgcagtattcatacayggyaactrtggagtacaccttcarkgargcccagtccaaggaggatgtgttgcggcatgtgcgwgagatccgttaccacggtggcracagraccaacactgggcaggccctgcagtacctytcygagyayagyttctctcccagccagggggaccgggmmcaggcacctaatctggtctacwtggtcacagggaaccctgcctcsgatgagatcargaggttgcctggagacatccaggtggtaccyattggrgtgggcccccrtgccaac

SEQ ID NO: 4055 - DNA, 1400 bp, Cricetinae gen. sp.
  misc_feature (1340)..(1358): n is a, c, g, or t
tcgccattcaagtaccagagcctgctgaccaagaataaggcccgaatggtcatcctaatggtgtggattgtatccggccttacctccttcttgcccatycagatgcactggtaccgtgccacccacmagaaagccatcrmctgctatcwcaaggagacttgctgygacttcttcacgaaccaggcctaygccattgcttcctccattgtrtctttctacgtgcctctagtggtcatggtctttgtctattccagggtcttccaggtggccaaaaggcarctccagaagatagacaaatctgagggaagattccaytcccmaaacctcrgccaggtggagcaggatgggcggagtgggcacggactccgaaggtcctccaagttctgcttgaaggagcacaaagccctcaagactttaggcatcatcatgggcacattcaccctctgctggctgcccttcttcattgtcaacatcgtgcaygtgatccaggamaacctcatccctaaggaagtttacatcctccttaactggttgggctatgtcaattctgctttcaatcccctsatctactgtcggagtccagatttcaggattgccttccaggagcttctatgcctccgcaggtcttcttcaaaagcctatgggaacggctactccagcaacagtaatggcaaaacagactacatgggggaggcgagtggatgtcagctggggcaggaaaaagaaagtgaacggctgtgtgaggaccccccaggcacggaaagctttgtgaactgtcaaggtactgtgcctagccttagccttgattcccaagggaggaactgtagtacaaatgactcaccgctgtaatgcaggctttctgctttttaagacccctccctgacaggacactaaccagactatttaacttgagtgtaataactttagaataaaactgtatagagatttgcagaaggggagcatccttctgcccttttttattttatttttttaagccgcaaaaatagagagggagagaaactgtacttgagtgcttgtttgtttcttgtgcaattcagttcctctttgcgtggaacttaaaagtttctgtctgaagtatgttgggttctagaggactgtctgtatgtttagatgattttccatgcatctacctcactcgtcaagtgttaggggatacgctgctagtaatttgtacctgaaggaaattttccttcctgtacccttacacttgtcaatcctgtgtcttggacctttctgctgtgaatatatactctctcccgctccacttatttgctcaaatggagtgtgtagacagggatcttgagggacagcttcagttnnnnnnnnnnnnnnnnnnnagcaaagtctaaagtttacagtaaataaattgtttgaccacg

SEQ ID NO: 4056 - DNA, 600 bp, Cricetulus griseus
  misc_feature (62)..(84): n is a, c, g, or t
  misc_feature (91)..(131): n is a, c, g, or t
aaacagcttcaagaggagggaaaacgggtagcaatggtaggagatggaatcaatgattctcnnnnnnnnnnnnnnnnnnnnnnnggaattnnnnnnnnnnnnnnnnnnnnnnnnnnnnnnnnnnnnnnnnntgtggtttttataaggaatgaccttctggatgtcgtggcaagtatcgacttgtcaaggaagacagttaagaggattcgaatcaattttctctttcccctaatttataatctggttggaattcccattgctgctggagttttcctgcccattggtttggttttccaaccctggatgggatccgcagcaatggctgcttcatctgtttctgtagtactttcttcccttttcctcaaactctacaggaaaccaacttatgacaattatgagttgcgtacccgaagccacacaggacagaggagtccttcagaaatcagcgttcacgttggaatagatgatgcctccagaaattccccgagactgggcttgctggaccgaattgtcaattacagcagagcctctataaactcactactgtctgacaaacgctccctgaacagtgttgttaatagtgaacctgacaagcactcg

SEQ ID NO: 4057 - DNA, 600 bp, Cricetinae gen. sp.
ggccttcttgggctctgtagcaggtctagtgacwggatggtcrttggctttyctggcttttgagcgctacattgtcatctgtaagccctttggcaacgtccgcttcarctccaagcaygcactgrtrgtggtcctggtcacktggrycatwggtrttggcgtgtccatcscaccyttcttyggctggagcaggttcatcccggagggcctgcagtgctcctgyggcccggactggtacacggtgggcaccaagtatcgmagcgagtmctacacctggttcctcttcctgttctgtttcatygtgcckctytccctcatctgcttctcctactcgcagttgctgaggacyctcagagctgtggcagctcagcagcaagagtcagctacgacccagaaggcrgaacgggaggtgasccwcatggtggtggtgatggtggsrtctttctgtstctgytaygtgccctaygctgccctggccatgtacatggtcaacaatygcaaccacgggctggayttrmgrctmgtcaccatccctgccttcttctccaagagctcatgtgtctacaatcccatcatctactgctwcatgaacaagcagtt

SEQ ID NO: 4058 - DNA, 264 bp, Mesocricetus auratus; identical to SEQ ID NO: 416

SEQ ID NO: 4059 - DNA, 1400 bp, Mesocricetus auratus
  misc_feature (371)..(395): n is a, c, g, or t
  misc_feature (555)..(568): n is a, c, g, or t
  misc_feature (570)..(597): n is a, c, g, or t
  misc_feature (626)..(643): n is a, c, g, or t
  misc_feature (1083)..(1111): n is a, c, g, or t
cactgtgtcaccaggggagaaggtggacatgactcctatctatgggctgactttaaagcacgcccgctgcgaatacttccaagcgcagacacggtcctctgggcctcagyatccacaagcttagactgccctgtgtggtcaccagagcagggggctgttccagggatttaacttcactcagaaacacagactctgggcttgtgcttgcctcctgatttggtcttgcttctccgcatgctgatcacagacactgggacacagcagagacccactggaacatcagagtcattcccaagttcaccagcaactaggggggcctgaaagggaaaggaggtccctgggcctcagaaaactcctgcagagastccccnnnnnnnnnnnnnnnnnnnnnnnnngaaaaatgcttagagcatggtcatgccaggatctgtcaggcttagaggagctgtccagaatagagggagaagacatcttaaaatactgccacaggcctgtccacgtttgccaggcattggtggtgcacacctttaattccagcactggggaagcagacgnnnnnnnnnnnnnntnnnnnnnnnnnnnnnnnnnnnnnnnnnncgagttccagaacagcctccaaaacaatnnnnnnnnnnnnnnnnnncaaaaaccaaaataaacatgctgccacagaagtgcttctgccatttactagggctggacagctttcccacatgggtctaggacgatgtctgtggtgatcacctttatttgtccagggtactcctgtccttgcaaaagcccccgttcctgctctggaagtgctgtgtcttgtgtctaggaagatccaagaacagagggacagactttctgggcagtaggaccaggtcaagagtaaagggatgactcttgagacaagagtcttgtgcagctcagattgcctctgagcctgctgtgtattgatcgtgaattacttacttttttaatgcttttactgacataccaagtgctaggatacagtcattggtctctcttctttactgtataaaatgttcatttaaaaaatgtttgtaccagctgggcggtggagatgcgcacctttannnnnnnnnnnnnnnnnnnnnnnnnnnnncgatttctctgagttcgagaccagcctggcctacaagaactagttctaggacaggcctccaaagccacagaaaaaccctgacttgaaaactccccccccccaccgcaaaaaataaatgtttgtacctaagaccttttattttggcccatattttgcttatgcatttgtattagtcatatcttaagagtttagatcaatgcatttactattacagagaaaaccctaactcaagtatccagaaatatataggaactacctacctgagctaaataaaatattacctggaagt

SEQ ID NO: 4060 - DNA, 600 bp, Mesocricetus auratus
cagtggcaggtcaaccatgacgaaaagcagtggaaagacccctttgtgttccgtccagagcggtttcttactgataatgacacagtcatcaacaagactctgagtgagaaggtgatgctctttggcttgggaaagcgcaggtgcattggggagatcccggccaagtgggaagtcttcctcttcttagccatcctgctgcagcagctggagttcagcgtgccaccgggcmmaaaggtggacctgacacctacctacgggctgaccatgaaacctcagacctgcaaatacatccaggcgtggccacgtttttccaaatgaagatggctgaggcaggggaggaggcatccatggggctgtcacctctgtttctttccctttctttttaaataacagcttttttttggagtacaattctttcaccaaataattcacctccaatcaaatagaatattgtctgtcatatacccccaaacctatacccattaagatttatgactattcatcctaacctgtctcccttgctccacmagatgctaatgwagtttttgactcgataaatttgcctactctagtcccatcacataaactcaatgatctatg

SEQ ID NO: 4061 - DNA, 1400 bp, Mesocricetus auratus
catygaggaccgtgtacaagaggaagcacagtgycttgtggaggaactgaggaaaaccaatggstcaccctgtgatcccacgttcatcytgrgctgtgctccmtgcaatgtgatmtgctccattattttccagaatcgttttgattatamagatmaggattttcttaccttyatgraraaastaaatgaraatgycaggattctgagctcdccctggttkcaggtctgcaataattttccttyaytaattgactactgtccaggaagtcatcayavaataacaaaaaatrtcaattatwtbaraarhtacmtttyrgagaaaatrraagaacatcaggaawcattggatrttgmaaaccctcgggacttyattgattaytacctgattaaactaaarcaggsaaacyacaatcarcaatcrgaatttwcacytgaaaatctgrcaaccactgtvagkgatctgtttgstgctgggacagagacaacragcacracgctgagrtatgctctcctgctcctgctgaagcacccacacgtcacagctaaagtccaggaagagattgatcaagtrgttggcagacaccgcaasccctgcatgcargacaggagccacatgccctacacagatgccatgattcatgaggtccagagattcatmgacctcatccccaycarcctgccccatgcggtgacctgtgacattaaattcagggactacttcatycccaagggaacaacgrtaataacwtcactgtcatcagtgytgcaygacarcaaggaattccccaacccagaggtatttgacccwggccaytttctwgataaraatggaaastttaagaaaagtgactacttyatgccyttttcrrcaggaaaacggatrtgtgcaggrgagggcctggcacgcatggarctstttctattcctgaccaccattttrcagaactttaagctgaaatctmtgrttcacccwaaggacatygatacaaccccagtrstraayggatthgcctctctgccaccctcctatcagctctgcttcattcctgtctaamgaagatwmgastttctggccyaggmtgygwttdttttytcgcaatccmctytagaccttcawtccrtcwgggacaaagtgtcctyyctmccctctcatgtattcycattcwrtsaaktcycargaaacasctgtcaaycattttgcaawwtctggartcastgcayaaatrtatttctatttkytattctttgyaacagtsttrytatyccttrtgctaatatrtatstkktcytgarmwaaamtayaamtttacyrytatatwactaatayaataagataattcattgtyatttttctkcytcatgttttcartaataaatrtatttgatttgtgtaaaaaaaa

SEQ ID NO: 4062 - DNA, 1400 bp, Cricetulus sp.
  misc_feature (197)..(204): n is a, c, g, or t
ctaagcaccaaatcagacaratggaaatgaagattytaagagttctaaacttyagtttgggtcgccctctgcctctgcacttcctccgtagarcstctaagattggagaggttgacgttgaacagcatactttggccaaatacctcatggagctcactwtgttggactatgacatggtssactttgctccttctcannnnnnnnctggagctttttgcttagcactgaaaatycttgacaayggtgaatggacaccraccctgcagcactacctgtcctayactgaagaatcccttctgcctgtcatgcagcacctggctaagaatgtagtcatggtgaaccrtggccttacaaagcacatgactatcaagaayaagtatgcaacatccaagcatgctaagatcagcactctggcacagctgaattgtacactagttcagaatttgtccaaggctgtgkcaaaggcrtaactcaagtggaccacwacactacatcgscaaatgyrattggcaccatgtgccrcctgtacatagtatmcagtgtttacttgctcttcaataaaggytgttttacttttcatagcttacctcatwtgrwwsyyggwtsytctgactctaggataacaagggttgtctaaaacatttaggattatttttgaaactgcttttagtttaacagagaatccaagtaatgtacgtaattgtagcctatatgtttatgtacttccttctttaatgtgtcctggtcatatcttttaagtcatcctgcaaagccctctgcctagctcttgtttaaactgtcaatttaccagcttgtccttagttcccttttctatttcttcaggtggttgctgtccttcactgtgtcttgagctatggactttcagatctgaaccccagttttcttgtgaattatttatttgttaattggcttgggaaatagcatgttttaaaattaaaggtataaaaagaatttgccccttaatctcaatgtcctatataaatgtaatcatgcatatgttgtcaaggagatatggactcatttttttcaacaatattccttttaatgcctatattgcatttcctaagtgtacatttcatactgtatgtaatgtattcagtgatcctttacaatacattcaaattgcattctctcattgcctctaaacaatactgctaaaatgttgttttatgccttgcttggctgtatgcatagtagctttcccagggggtatatgctttaaattctgatgaagccagatgagacttttggttgtgggcactataccaaggtgccatttcctctatctttccactgtcttatgacacttaactggcaaaaatcctgtctctgtttgttttaatttatacatctgatgtcaagttgaataaaatttatta

SEQ ID NO: 4063 - DNA, 600 bp, Cricetinae gen. sp.
ttcagcactctgtctaccttctgcagggcaagaagtcaggagggggatagggattggtctgttcaccataattcacaaggcaaggtgaaagacactggaatctttcttttagtaattttgttttctggtgctaacgactgaacacaggacctcgccctcactaagcaaatgcaccacccgtatgccagattttctagctcctctttttggcgttttagctcttcagtttgtcagaggtccctgttgccatcttcttcctctgagagtcacccctgactccatagtggaagtgaagctttagatgtcactttgaaaggctttgacctggtcaggtcatcgggggacattttctataaaagagttaacaattatatttatatttcaagttatagtagtttggatattttagtgttttgatttttgtttttttggggggcggggcagtgtggatggatttgttgccatgtgcactttggaattttgtaatgcaattgttgaaagaaaatatttcttttatgatcttctccctctaccccttgtcctccagtgttctgttaatatttatttgtaatttagtttgtaattcattaaaagaaatta

SEQ ID NO: 4064 - DNA, 983 bp, Cricetinae gen. sp.; identical to SEQ ID NO: 422
  misc_feature (80)..(104): n is a, c, g, or t

SEQ ID NO: 4065 - DNA, 1244 bp, Cricetulus griseus; identical to SEQ ID NO: 423

SEQ ID NO: 4066 - DNA, 1354 bp, Mesocricetus auratus; identical to SEQ ID NO: 424

SEQ ID NO: 4067 - DNA, 600 bp, Cricetinae gen. sp.
gatycagagatttgctaaycttgctccctkkggcattcctcggaagactatcmagaayaccacattccgtggcttcttcctccccaaggacacygamgtgtwcccyatactaggttctctgctgackgacccaaagttcttcmccagtcccaaasatttcaacccccagaacttcctggatgacarrgggcagytgaagaagawtgctgcttttgtgcccttytcygtaggaaagcggttctgtytgggggacggcctsgcyaggatggagctctttctcttcytcaccacyatcttgcagaacttccgsttmaagttcccaaagaagctggaagacatcgacgcgtcccccaaaccgttrggrtttkccaggatcataccacrttacaccatgagcttcctgcccatctgattcyggrrycaaccaaggtggagcaarakggrggkrgagtctggagtgagrccagagrcagagygaagggagaaggtgaaaaytggggtttcagaagggaccacatgsctggaagaaaatttayryrccyrcttaaattgkgaygctaatwaaacraatarcrykcagtggacagtggtcaaaaaaaa

SEQ ID NO: 4068 - DNA, 1400 bp, Cricetulus griseus
ctactckccracctctccatcctactcsccaacctctccwwsctactcmccracctctccatcctactccccracytctcccagctactccccracmtctccyagctactcmccracatcaccyagctactccccracttctcccagctactccccracatcwccyagctactcaccmacmtctcccagctactccccmacytcmccaagytaytctcccacctcccccagttactcaccgacwtcyccmagctaytctcctacatctccaagctactcgccaacttctccaagttattcwcccaccagccctaactattctccaactagtcccaattayacsccaacatcmcccagctacagcccaacatcacctagytactcrcctactagtccaaactacacaccaaccagyccyaactayagcccaacctckccaagytattccccaacttcacccagytactccccsacctcgccaagctaytcmccctccagcccacgstacacaccacartctcccacctacacmccmagctctccmagctacagccccagctcwccaagctacagccccacytcacccaagtataccccaactagtccttcytacagtcccagctcwccagagtataccccaacctctcccaaatactcacctacaagccctaaatattcacctacwtctcccaagtattctcctaccagycccacytactcacctaccacmccaaaatactcgccaacctctcctacatactcrccaacctctccagtctacaccccaacctcccccaagtactcrcccaccagccccacctactcccccacctcycccaagtactcrcccaccagccccacctactcccccacctcccccaagggctccacttactcyccyacytcccctggytactcwccyactagccccacctacagcctcaccagcccagccatcagccckgaygacagtgatgaggaraactragggygagcagggcgcagcagcagcaggttagggtcrgacagcctyagtggcctgtgcagtcacttcccttgrgctgtgaccctrgcctggrccccttgtacataactccttgtgacagaaccctcyggaggttctagatcccatttttgatgggcttttygtcttgycctrcactcrtgctktctkkskwsksactsacagctgcaggrytttrttaccccacctgttccrtgcctgactccacagtgaaggtctttgcttgcctgtgacttgattgggattmaaggcattttmacytctgaaggctmrttcctgctttgggtcayacaaatgacctctggaagaacaaagcttaagctgccttttgtctgttatttttttgaaatttaaataaagtttactmattttgacc

SEQ ID NO: 4069 - DNA, 600 bp, Cricetulus sp.
agtgctaataactatttgccagtagctgatttgtttatgtggatcacgtctcacagagtttattggaatgtttgatcatgttttctcagaactgtttttgctgtagttgagtttgcccatatttatgtaggctttattttattttttggatgatcattagtgttaaagaaatcaactgaaaaccatgaataatactgtaaaaagacaaaacagttaaaagcagtattcctgatttctgtctccccagtatctaatattggggtggtatttctaagaatgttgacaacattatctgaggctttcttaaggatttccacacattcatataaaaaaaatgagtttagtatttgtttctccatggcttctctataacccagtacactgaagtatcggtgactgcatatggcaactccatcagtgagctgtgatggtaggattttcctacctctgtacttttacctgtagactatttttactacggtgctttataatgtgttttaaagcattgcatttacaaaagaaaaatgctgtaaatattgcatattttatgtatttggaccaaaaagttacaagtcagtagataaaaagtggttttgcacc

SEQ ID NO: 4070 - DNA, 603 bp, Cricetinae gen. sp.; identical to SEQ ID NO: 428
  misc_feature (508)..(536): n is a, c, g, or t

SEQ ID NO: 4071 - DNA, 1400 bp, Cricetus cricetus
  misc_feature (975)..(997): n is a, c, g, or t
gtggtggctttcctggatctgaggatacsaagcttaaatttgaagagatcaccagtgttatcaacccagctctggacaagtacttcccgccagactctggagtgagagttatagccgagccaggcagatactacgttgcctcagctttcacactggcagtcaatatcatagccaagaaaatcgtatcgaagggctctgacgatgaagatgagtccagtgagcaaaccttcatgtattatgtgaatgatggagtgtatgggtcatttaactgcattctttacgatcatgcacatgtgaagcccctgctgccgaagagacccaagccagatgagaagtattactcatccagcatctggggaccaacatgcgatggccttgaccggattgtggagcgctgtaatctgcctgaaatgcatgtgggtgattggatgctctttgagaacatgggtgcatacactgttgctgctgcatctactttcaacgggttccagaggccttctatctactatgtgatgtcgaggccaatgtggcagcttatgaagcagatccagaaccatggcttcccaccagaagtggaagagcaggatgttggcactctgcccatctcttgtgcccaggagagcgggatggaccgtcatccagcagcctgtgcttctgctagtatcaatgtgtagatgccattcttgtagctcttaccttcaagtttagcttgaattaagggatttggggggaccatttaacttaattactgttagttttgaaatgactttgtaactacagagtagggcttggcacagatgaagtatggaaggctaggagatgggtcacacttacctgtgttcctatggaaactttgaatatttgttttatatggatttttatcacttttcagacatactaacgtgtgcccctcagccactgagcaagcatttgtagcttgtacatttggcagaatgggccaaaagctaatgttgnnnnnnnnnnnnnnnnnnnnnnntcttgaaataattgggcatcagggaatgtttgcaatgtcccttaaagaagggacacacttcctgcacaggctgctgtagtcatacgagtgagtccaaacatagcagagaaggaaaaggtggatgggacaaggctataccctctacacagcatcagtttgcctagccagtccttaaagtgtgtacttggctgtgaagttggtgaggaacgtcatctgcctagcgacctgatatcctggccacaccccagggaaggcatctaaggctttttgaaccttgcctgcagaagccttgaatgttcctcaacccttgacttcgcctgcatcaccacctagtaacagttggaagtatcatacagcacttggcaatcaacttcctgtaataaatctcaacagcagcaactac

SEQ ID NO: 4072 - DNA, 487 bp, Cricetinae gen. sp.; identical to SEQ ID NO: 430
  misc_feature (306)..(325): n is a, c, g, or t

SEQ ID NO: 4073 - DNA, 377 bp, Cricetinae gen. sp.; identical to SEQ ID NO: 431
  misc_feature (228)..(260): n is a, c, g, or t

SEQ ID NO: 4074 - DNA, 1400 bp, Cricetulus sp.
tgtcttttccctctacttcatgataccatttttttttaccaccttgggattgctataccataactggtacccatcacaggtgtttgtgggagataccttctgttattttgctggcatgacctttgccgtggtgggaatcttgggacacttcagcaagaccatgctactcttctttattccacaagtgttcaatttcctctactcgctgcctcagctccttcacgccatcccctgccctcgacaccgcatacccagactcaatccgaagacgggcaaactggagatgagctattccaagttcaagaccaagaacctctctttcttgggcacctttattttaaaggtagcagagcgcctccagctagtgacagttcaccgaggcgagagtgaggatggtgccttcactgaatgtaacaacatgaccctcatcaacttgctactcaaaatctttgggcccatacatgagagaaacctcacactgctcctgctgcttttgcagatcctgagcagcgctgtcaccttctccattcgataccagcttgtccgactcttctatgatgtctgagttccctgaagactgactgcccatagcctccgttggacctcacccaggaccaacctgtctggtccaagactgccttctggtccaggcctctccaactgttggttttttcagttttgttttcagcttctcccatcacctgtaatgattattggcctggaccttattggactttaaagtccattagttgcactttgcccctggctttcttcagcttgctactcttyccctttctgtcccatctgcagcaccataagggggatgtagcagctcttatgcaaatacagctcaactttcagagccctgcatttgctggaccttgagagagaacctgggctatgtgctagagttagggccctatactccaaggtaacctcacatttgactttaaaattaagtgttctgattaggaagatcagaggcagggmtgacatttcagtttgcctcaaatktkactrarggwttggtctttttgcgttccactctaccttgtagcagtagtatgaattcacatgatcccgtaacatgtcaacagtagtcatacagtacatggccttgcaattacttttcaatgcaactttatgataattttttctaactgcttctttatatagaaaatacattatttccttcaggcaggtaaaataactttccaaaaagaaaatactgagaaacaacaaataaaaatatttataccaaacacaaaatgttggattcaagtctaatgagtcctttgcataagaacaaacaatgtgttgtactgtttttttttttaataataagtagacattcagacaggaagataactttaaagttaaaaaaattaatgactttctcc

SEQ ID NO: 4075 - DNA, 600 bp, Cricetinae gen. sp.
  misc_feature (352)..(369): n is a, c, g, or t
gccgcctgcaggatgagattcagaacatgaaggaagagatggctcgtcaccttcgtgaataccaagacctgctcaatgtyaagatggctcttgacattgagatwgccacctacaggaagctrctggaaggcgaggagagcaggatttctctgcctcttcccaacttttcttcmctgaacctgagagaractaatctggagtcactccctctggttgacacccactcaaaaagaacactcctgattaagacrgtggaaacyagrgatggacaggtgatcaatgaaacctctcagcatcaygatgaccttgaataaaaattgcacayactcygtgcaacaacgcagtaccagcnnnnnnnnnnnnnnnnnnttygtatcttaaggaaacagctttcaagtgcctttactgcagtttttcaggagcgcaagwwasatttgggatagaaataagctctagtttctaacaactgacaccctaaaagatttagaaaaggtttacaacacaatctagtttacgaagaaatcttgtgctagaatacttttcaaagtattttgaataccattaaacgctttcccagtatacgaccaactgacgcttata

SEQ ID NO: 4076 - DNA, 600 bp, Cricetulus sp.
tcttgtggagcaggctctcagatacaattagaaagaagttggttacactatagtagacaagccactactgcaccagtagactaatattgtarcattcgrggcctaccactaggtaagtccattaatgacttttctcccccagtgatatgcatagcaccttctgtcactgtgaaagctatccagtaagggggaagtttacaagtcaactccagatttaattctctatgtcctgcaaccacaatgtcttttgcctttaccatctagctgtggtgaccatccaagagcaatggcaataacctgtgttgtttgggaaacctctataaccaattgctcctaaggaggtagcccataccttgcactgagattttcatttaatgacctatgtcttcatttaataaccattgcccaccagtgtgcagggtactgcaattcagacttttttttttttagttataattaccttacaaagtagtggaatgctttgttttctcatacaggctcagatttagttaacccatagatacaaaagactatagatacagtcttttgaatgtgagtagtcaattcaaattcataatattctagatttggatccgtcga

SEQ ID NO: 4077 - DNA, 600 bp, Cricetinae gen. sp.
  misc_feature (491)..(519): n is a, c, g, or t
ctttgaatacagactcaactgagacgtcgtgttcggttgaatgacagactgaatgatggtttgtttgtttgtttagtgtccttccgcagaaagaagccttggctttcgttccctgatggaatttggagttcagcgggccaccaagggtccctgccagtgctgccaggtgctgagaccctcggtggaaagaagccggttcagtgtctgtggctctgcactggtcgtgcccagtgtggattcccttggtggttgttcctgggctccatggccttgagggttgcacgcagggggaggcgtcgggtcgggtgcggagcaatatccagcctcgaccccagcaggcttgcgggcaccctctgagccgggtccttgccctcctattgctccccgagtttgtcctccagctcccggtgtatttcatggaggagcgacggctgttttgtaaccttccttgtgctgagtgcactttcttaggtgggcttgtcgggagaccnnnnnnnnnnnnnnnnnnnnnnnnnnnnngagatggatggaagcgtggatggatggttggttggatggatggttggttggatggatgggtgtgtgggtggatggatggat

SEQ ID NO: 4078 - DNA, 1400 bp, Cricetinae gen. sp.
  misc_feature (635)..(654): n is a, c, g, or t
aataagtagaaaatatgaatacttgtttggggttatgcttgaaacttacttttaaagaaacaattgtatagaagttggttgccagtgagtaataaaagatttaagtgtttgaagaagtagcaagagccgttttaaaagaatattacaattacttcccagaaatatgtggaacactgaaatagtcctctgtgtaagatgctccacatggggcttacagcatccttttgttttcctgaaagtgagctgtatgctaaatgttcatatgtggtgtttccttcaggatcsrgggaccgagtggctacaatgttgtcacgacttttccgtatgcatggcctctttgtggcctcccatccctgggaagttattgtggggacggtgacacttaccatctgtatgatgtccatgaacatgttcactggcaacaacaagatctgtggttggaattacgagtgcccaaaatttgaggaggttagtgagattcatttgattctgactaaagtaaattacattgcaatttctaaagaatgtctgctttttagagaacatataagctaagaattctgagtgaagtcttagctggtgggcttacctcagattctcagctattcacatggtatggattgcatttaaaaatnnnnnnnnnnnnnnnnnnnnactagttagagtgggtggctctgggaaatacaccttttgtaaggactatcaggggaaaatgactgaagaattacagattgcttaataattgtattcaatttttttatttctgtgttggctattttgatttggttgtactatgctggcatttatattcttgtggtaacatgtaaaccaatgatacagaataaaagtcttgcttttgagaacttctttgaaagtgctctctctgccaataggatgtattgagcagtgacatcatcatcctcaccataacacggtgcatcgccatcctgtacatttacttccagttccagaacttacgtcagcttgggtcgaagtatattttaggtaatactgattttcccctttgcatgctgtctgatttgctgtgggaatttctaattacataatgccgttaaaagtgttgggacgttcagtagttaccagattctccttagtaaatattctcaaatctaaagcctcagtaacatggaggaaagtgaaattgttcttatcagaacagtgtatgagtctaaatgttggcctttgtgcaataaagagttctgagtgttgaattttgccattttaggtattgctggcctgttcacaattttctcaagttttgtctttagtacagtcgtcattcacttcttagacaaagaactgacgggcttaaagtaagtatttaaagctcaagtgtatgttctctaaaatacattttaagaacctttatttcctgtgtt

SEQ ID NO: 4079 - DNA, 1016 bp, Cricetulus griseus; identical to SEQ ID NO: 437

SEQ ID NO: 4080 - DNA, 600 bp, Cricetinae gen. sp.
gagtccatgatgatcttaattcagtatactatctgctccacaatggaccctgtcctcctcaaggttctgtgaggtccttcaaataccaagaaggcatgttgcagctttgcggttccatggactgtctcactaagcctgaagtgaaagaagctgaaagacaaataaccatcttctcaagaagccaggtatatgacccatgactccatcaagcaacaactcaaagcagtacctctctctaaacaagttcttccccttccctgtagtctgtcacaccttgttctggctgaggaatacaagcatcacagattcttaatcatctcctttgtcaattcttgtatgtggaattgtgtggttattattatatcattattatctaatttatattattcattattcattcaagactaaagaaaaagtgtccctccaagagtcaaaagccatctaacaaaaactcaaacaccaagcacaaggaagaccctctttttaattgtttgtcagagttgtccaagaaactctcaagacattataggctattgctattgccattggttgttccagcaggggtagaaattaagtcactaatgctgaagatatgaattc

SEQ ID NO: 4081 - DNA, 1400 bp, Cricetulus sp.
  misc_feature (34)..(61): n is a, c, g, or t
  misc_feature (1340)..(1375): n is a, c, g, or t
ggcaaaggatatgggaaagaagtgtagggatttnnnnnnnnnnnnnnnnnnnnnnnnnnnncttagcttttaacagtgtcatgaagattatawtrwrwgcctyawgttkwarttttagaactctttagagagccttaacttttaaaatcattctgctgaattcatctattwkwaatgttttaaaaggaaaaataacaactaacttgcttgaggtaactctaaccttaatcttgttttgttgttgtttgtaatgctttgtcagagattgttactggaacatttatggataaaaatactagttaaaagttggaggtttataaaatactgactaaagtatttttctagcatcatagttgcctckagtaggtgcctgctargtatatmtttaasaaatttaaagcatgaaattctggaaacatcttggctgttatagccacagtctgtctgtctgtcatctgctggrgacttctcaratgcttactgcaagcctagtgctasaatgttgtcactaaattgctaccttgctcctcttcagagacattgagtggttacaggtcattgccatttttgaaatctactgcaaaaaagttagtattaaaatctacaaaacttttaacacagtctgatttaatatagacaggtatttcaggcatctgctaaattcaktttarttttccaaaaccctasttatggtatgaaamtcttgyaatctttgagtatgtgtgggttttggggggcctggtggttctgakgattgaacccagggccacaagcatgctaagcacatgctgtaccactgagccacatcccaccagcaccctggaatcctccttaaccccgagacctttgctctttgatttttgatagttccatttatatcctagtttagagctgtatgcgagatatcagtatggactaaatgtgtgtgctagttttgttttttacattgtttttcagtatttgcaaaaccaagagggccagagtttggccccggggaagccaataaagataaaatagggagggagtttgctgagttcacttgatttcagtaagtacccacctccctgccacatacaccaaggcttaaagagaaacttatatcatgcttagaattattggacatagccttacctctacaaaccttagctttcgtgacccttttcacttacctgaaatatagaaaatgggttcaatgtaaggataggaggaaggatgggcaggattggaattgtagtattttttaaaaccaatatcttctaaatagagacagaaaagatatatgacactaaattgtactcaatgcatctaaaataccattgtaattgacggggtgaaaatannnnnnnnnnnnnnnnnnnnnnnnnnnnnnnnnnnnaataaaacatttattttatttttag

SEQ ID NO: 4082 - DNA, 1400 bp, Cricetinae gen. sp.
  misc_feature (94)..(95): n is a, c, g, or t
  misc_feature (944)..(962): n is a, c, g, or t
  misc_feature (1203)..(1219): n is a, c, g, or t
tcacttcacattgtggggaaktctactttagatrtcaacttgtttttgcacatgtttcctctagtttctctgttcagagccccaggcgactttnnttctggggtaaggcaagtcagttgactggggtccytcacctcgcttcccyaatctacattygggcracmgcatcggggtcacttaagactttctgtttttgtttttaacctagaagaaccaaatcckgatgccaaaacgtargcttagyttgtgtgttgtctctaagtttgtcgctcatgcgtgcaacagggtatagactattctgtatggtgccccatttttttggtgattcataagtaggctggctagtccaggacgccatggggtagccacctcctgaccagtcatgcctgtgtgcataaactcagggccatgaccgtggcctgggccactgtgacatcagaagagcctgtgtgagaacttaactcctatagcacagtctagggatggaggggaagaagactgtggggtgggggaggggtggcaaggatgcccaagactctcctgcctttggtaccatctctggtcacctttctcccggaagttgacaagacacatcttgagtacagctggcgctggctcctccaagaaccaagttcaccttcagctcctgcggccctgccccaggctggagtcagaaatgcttcccaaagactgagagtcttttgcttttggcaaaacgctacttaatccaatgggttctgtacagtagattttgcagatgtaataaaccttaatataaaggagtcctatgaactctactgctttcgtttcttctctgggctggtggtgtagatatagccagccttctctcaaaccctggtagctcagggaagcttggctcaaggctgcgtgcctccaattgtattctctgaggggtaggatcctgggtccaggattcctcttannnnnnnnnnnnnnnnnnntgttttcttttggccaaacttcttttgaaagttggtaggatcagccaaggttttacagggcctgatgtctgctcttgtaaataagtggtataagtaactgggactctagcataacttgacctggggccaccagagtcacacttggtttgcagagcagacacctgggacagcgttcctcccgtgtgtttgccgggacacttttccgaggactccttgcttatttagcacaacaatgttccannnnnnnnnnnnnnnnnccgttggcccagctagacaagagacctgtgccccgtgttccatcccagaacttgttgccagcatataatggctggcggggggtggggtgggggtggggtcagatctgagacagcttgtgagaccctcaggctgggcccattcgtgtaattgcaataaatggtacgtgtccatttggacagc

SEQ ID NO: 4083 - DNA, 761 bp, Cricetinae gen. sp.; identical to SEQ ID NO: 441

SEQ ID NO: 4084 - DNA, 1400 bp, Mesocricetus auratus
  misc_feature (78)..(95): n is a, c, g, or t
  misc_feature (249)..(266): n is a, c, g, or t
  misc_feature (645)..(659): n is a, c, g, or t
tcccccctggttcctccatgcaaaccaccgaggctatatcaggctcagctaacactccaatccacaatggctccttgnnnnnnnnnnnnnnnnnngcactggtccccactaccagtgcagcccacagtggtgcctcagctatgactaatagctctgaatcagacttggctaccactccaattgacagtggcacctctatctctactaccaaggcccctgccaccaccccagtccacaatggctccttgnnnnnnnnnnnnnnnnnngtgttgggctcagccaccactctgatccataatgacacctctacaatggctactacaactccagttggcaatggtacccaatcttcagtcccaagccggcaccctgtgactcccacccctcctgccgtctccagcaacagcaccattgccctaagcacttactatagcacggccctctcccctgccttctccagccatgctgcaccgcaggtgtctgttggagtctctttcttcttgttgtcttttcacatttggaaccaccagtttaattcttccctggaagatcccagctccaactactatcaagaactgaagaggaacgtctctggattgtttctgcaggtttttagccgagctttcctggggatctctaccatcnnnnnnnnnnnnnnntccgtggtcgtagactcgactgtgattttccgggagggtgctgtcaatgcctctgaggtgaagtcacagcttttacagcatgagcaggaggcagaagagtataatctggccatttcaaaaatcaacgtgggtgagatgcagtttccttcctctgcccagtcttggcctggggtaccaggctggggcattgccctgttggtgctggtctgtattttggttgctttggccatcgtctatctcattgcattggcggtgtgtcagtgccgccggaagaactatgggcagctggacatcttccccayccaggactcctaccatcctatgagtgaataccccacctaccacactcatggacgctatgtgccccctggcagtaccaaacgtagcccctacgaggaggtctcggcaggcaatggcagcagcctctcttacaccaacccagtagtggcaaccacttckgccaacttgtagggcaagccacccgcgcagggcagctgtgtagtctgccctcagtcttcactgccagccccccccccccctgcactctgatctgggctggtgagccagagttctgataggctgttcccagccttcctgacacgcgcctggtgaagcccagccctgccctgggggacaccctggggcaggggttcagtggtgactctcaggaggactgacctagaaaggctggggacggagatgggaacccaagcctggctgaataaaagctggcctcctgtt

SEQ ID NO: 4085 - DNA, 600 bp, Cricetulus griseus
gtaaatacatggcttgctgcctgctgtaccgtggggatgtggttcccaaagatgtcaatgctgccattgccaccatcaagaccaagcgcagcatccagtttgtggactggtgtcccactggcttcaaggttggcattaattaccagcctcccactgtggtacctggtggagacctggctaaggtccagagagctgtgtgcatgctgagcaacaccacagccatcgctgaggcctgggctcgcctagatcacaagtttgatctgatgtatgccaagcgtgcctttgtgcactggtacgtgggtgagggcatggaggagggggagttctctgaggcccgtgaggacatggctgccctagagaaggattatgaggaggtgggtgtggattctgttgaaggagagggtgaggaagaaggagaagaatactaatctattctttctgcccctggatcatgtcaaactcctagaacttcagcttcaacattagctgataggcattgattcctctaattgtgtcatcttcattctgtgatcatgtatttgtctgtggccctgtatggtctttccatgatgtctcaaagtaaaaagctttaagacactt

SEQ ID NO: 4086 - DNA, 594 bp, Cricetinae gen. sp.
  misc_feature (121)..(138): n is a, c, g, or t
agtctccagctaataagtcacattgagcagtttttggataccaacgaaacgctgtattttatgaagagtatggagtgcatcaaagctttccgggaggaggccatccagttttcagaagagnnnnnnnnnnnnnnnnnnctggaagcccttcgagagaaagtggaaattaassaattaaatcatttctgggaaattgttgttcaggatggagttactytgatyaccaaggatgaaggcyctggaagctctgtcacaactgaggaagccacaaagttyctggctcccaaagacaaagcaaaagaagatkcagcaggacttgaagaaggtggcgatgtggatgatttactggayatgatatagacyrtggatgtgttgggaatcyaagcatgccatctccgttgctgagagctcagaaagagcatcctggaagccattcagggggacctgaagccctggtgatcattccagcagacagctcaggagcgaatcactccaagtctctacagaatgaccacatccacatatattacaaggggtaacttagaccctatccaaatttataaagactcactattttttgattgaaaaaaaaaa

SEQ ID NO: 4087 - DNA, 600 bp, Mesocricetus auratus
  misc_feature (430)..(463): n is a, c, g, or t
caagactgcatatataaggggctggctgtagctgcagctgaaggagttgaccggccaactgaccmtacattcacctagccaccatggacatcgccatccaccacccctggatccgccgtccctttttccctttccactcccccagccgcctctttgaccagttcttcggagagcacctgttggagtctgacctcttctcaactgccacttctctgagtcccttctacctgcggccaccttccttccttcgggcacccagctggattgacactggactctcagagrtgmgkmtsswswakgrcmswtyctssgtcaacctggatgtgaagcacttctccccggaagagctgaaagtcaaggtgctgggggacgtggttgaagtgcatggcaagcacgaagagcgccaggacgaacacggcttcatctctannnnnnnnnnnnnnnnnnnnnnnnnnnnnnnnnntgtggatcctctgaccattacttcatccctgtcatctgacggcgtcctcactgtgaatggaccaaggaaacaggcctctggccccgagcgtaccattcccatcacccgtgaagagaagcctgctgtcactgcagccc

SEQ ID NO: 4088 - DNA, 600 bp, Cricetinae gen. sp.
gccaaacactgtcgcagaccagtgatcaatgctggggatggagtcggagagcaccctactcaggccctgctggacatcttcactatccgggaagagctggggactgtcaatggcatgacgatcaccatggtaggtgacctgaagcatgggcgcacagtgcactccctggcctgcctgctcacccagtaccgtgtgagcctacgctacgtggcacctcccagcctgcgcatgccacctagcgtgtgggactttgtggcttcccggggcaccaaacaggaggagtttgagagcattgaggaggcgctgcccgacacggacgtgctctacatgactcgcatccagaaagagcgatttggctccacccargaatacgaagcttgctttggtcagttcatcctcactccccacatcatgacccgggccaagaagaagatggtggtgatgcatccgatgccccgagtcaatgagataagcgtggaggtggactcagacccccgagcagcctacttccgccaagctgagaacggcatgtacatccgcatggcgcttcttgccaccgtgctaggccgtttctaggccagcctcctgctggcctggtct

SEQ ID NO: 4089 - DNA, 250 bp, Mesocricetus auratus; identical to SEQ ID NO: 447

SEQ ID NO: 4090 - DNA, 600 bp, Mesocricetus auratus
  misc_feature (387)..(406): n is a, c, g, or t
cccacaacttcctcaaatcttcacttccgttttcccacgatacgtcacttcccattttaaaaaaactacaattcccaatacatgcaagttactccgccctaaaacctacgtcacccgccccgttcccacgccccgcgccacgtcacaaactccaccccctcattatcatattggcttcaatccaaaataaggtatattactctcatctattgtctaagtaaaaactaaattcatgaagaatattcatttttaagagcatagatttctgaattagaaaaaagttgtttttgttctgttttggataaaatcttgctacataacccaggttaaactcaaactcagggtcctcctgtctcagcctccagctgttataaaatctaaattctnnnnnnnnnnnnnnnnnnnnagtgggggcgcacacagggatggtggaccctaggtagctaacatactatgaccagccacatttgtacagtggggtcacagctgtagtatcttaaagaaaacttgtcaagggactcatggcaaaaaacaccccacaaacttcaattagttccttcgactttttgaaacagttactttgtttttctgacactttaa

SEQ ID NO: 4091 - DNA, 600 bp, Cricetulus sp.
gaggggtgaactggtgtgagagaacagccctccccaacggtggctgccaatacctgtgcctgcccgccccacagatcaatcctcactccccaaaattcacctgtgcctgccctgatggcatgctactggccaaggatatgcgaacgtgcctcacagaagtggcacctgtactgaccacccagggaacatccaccatcaggcctgagatcactgcaggagccgaaggctgcccgaagcacaaggaggatcagtcggcttccagtacttccaggcagcctgcacttagcacagtggagtcggtgacaatgtcccaccaagtccagggtgacagaaggaacgaggagcggccacagggtgtgggggtcttgtccatcaccctccccatcgcactggtcatcctccttgtctttggggccatcctgttgtggaggaactggcggctgaggaacatcaacagcataaactttgacaacccagtgtaccagaagaccacagaagatgaactccatatttgccgaagccaggacggctactcctacccctcacgacagatggtcagcctggaggatgatgtggcatgaacagctgtgagaaccttcc

SEQ ID NO: 4092 - DNA, 1374 bp, Cricetulus griseus
  misc_feature (931)..(934): n is a, c, g, or t
tgttcagcgtcagccctgtsgtsaragtggctgtggakgccaagaacccagctgacctgcccaaactggtggagggcctgaagcrgctggcaaaatctgaccctatggtgcagtgcatcattgaggagtctggggagcacatcattgctggagcaggtgagctgcacctggaaatctgcctcaaggacctggaggaggaccacgcctgcatccccatcaagaaatctgaccctgttgtctcataccgggagacagtgagcgaggagtcaaatgtgctgtgcctgtccaagtcgcccaacaagcacaaccgattgtatatgaaggcccggcccttccctgatggcctggccgaggacatcgacaagggtgaagtgtctgctcgccaggagctcaaggcacgcgcacgctatctagctgaaaagtacgaatgggatgttgctgaagcccgcaagatctggtgctttgggcctgatggcactggccccaacattcttaccgatatcaccaagggtgtgcagtacctgaatgaaatcaaggacagtgtggtggctggcttccagtgggccactaaggagggcgctctctgtgargagaacatgcgtggtgtgcgcttcgatgtccatgatgtgaccctacatgctgatgccatccaccgaggaggtggtcagatcattcccacagctcgtcgttrtctgtatgccagtgtgttgactgcacagccccgcctcatggagcctatctacctggtggagattcagtgtcctgaacaggtcgtgggtggcatctacggtgtcctgaacaggaagmktggccatgtgtttgaagagtcccakgtggctggcacccccatgtttgtagtcaaggcctatcttccagtcaacgagtcctttggttttacagctgacctgcgctccaacactggtggccaagnnnncccccagtgtgtgttcgaccactggcagattctgcccggggacccgttcgacaacagcagccgtcccagccaagtggtggctgagacccgcaagcgcaaaggtctaaaggagggcatcccagcactggacaacttcctggacaaactgtaggcaggcttgcacagccacacactgcacagtgcccacccatcagaagacaccttgagactgtccccataatgctgctctggaggtggctggggccaccctgccattgagcactaacacttgatgccgactctatttatttcggaatttccgaggcagtggagtcgccctctgcaggctggactggctggcgggccatggggtgggcaggacacagctctttatcattttcagagggaaaaatgctcagatatcaaacatctaaataaatgcattcagaggaaaaaaaaaa

SEQ ID NO: 4093 - DNA, 600 bp, Cricetulus griseus
cccagaatatgggcatcggcaagaacggagaccttccctggccaatgctcaggtactggctggattgggttagggaaaccgaggcggttcgctgaatcgggtcgagcacttggcggagacgcgcgggccaactacttagggacagtcatgaggggtaggcccgccggctgcagcccttgcccatgcccgcggtgatccccatgctgtgccagcctttgcccagaggcgctctagctgggagcaaagtccggtcactgggcagcaccaccccccggacttgcatgggtagccgctgagatggagcctgagcacacgtgacagggtccctgttaacgcagtgtttctctaactttcaggaacgaattcaagtacttccaaagaatgaccaccacctcctcagtggaaggtaatttggggttaagatgaggatttctagggtttgtatgaagcaagatttccaatgcagacgtggaagtgcgaagtctcccgtgggaatctgggaactttgcttcttggcagaaatttttgtgctgttcccagagtttattaagcatcctctttatatacaaaatatttgaaattttgttagcaagagcagtt

SEQ ID NO: 4094 - DNA, 600 bp, Cricetulus griseus
tgcattgtgatcgctcaccgcctgtccaccatccagaacgcagacttgatcgtggttattcagaatggcaaggtcaaggagcatggcacccaccagcagctgctggcacagaaaggcatctatttctccatggtccaggctggagcaaagcgcttgtaaactgtgactgtttgaaatgctaagtgtttttaatattgttgcttaaatatggcacttaaccaaagtttaaaaaggtgaacactgttgatggtaatttcatcaagatgacagtcttcagaaacttcgtaatttaattaataaaaactgaaaaaaatgtcattgatgggggcattgtgtttaattgcattatctgagacataaaagaaacttaaagaatttttaaaaataaaatgtgtaattttgtttcagtttttaatttcaaccctactttgttaaatgattataaaggttgtaaaatgtacttaaatattccataaagtgcctataaaaactaaatgttcatataattggagtcatcttgtctgttgtgtgtattaatttatatatttttccaaataggatgctgtaaataattttagctttcataaaatggattttaag

SEQ ID NO: 4095 - DNA, 600 bp, Cricetinae gen. sp.
ggaccttgccagtacctagatgagtagtttgtgggacgggcatctaacatactctgctctccaagtctacttccccaacacccacacaagtgctgggtctggggtacccaaagcctcaggaaccaatttagcactttatgggcacaattgctgcccatactggcagtaagcccttgggcctgtgacactgcgagggatgctcaagtgcattgtactgataaagggaacagactatcaggtaaagaaatgagtcacaacccctcagtgtggatctggtgggtcagcctttcagtgaggccagctaagtcagcagctttgtccagcttgatgtaggtgtccatgcgaatccgatgcaggctcagccagtctggcagcaactcagataggagcaacacatgtttctccatctcccctgtggaagtgcattgtggttaactgaagcacagtgcctggatgacttgcttaactcacttacccagcctggtgccttacacccctcaaggcttaacctgtgtgcagtggatccaagcagagcctgggccctgctctcaaacaccagggggatgaacagcaagggcaagacacatatacgccaagctt

SEQ ID NO: 4096 - DNA, 600 bp, Cricetinae gen. sp.
cagcctggagctgtggagctggcagccaaacactgtcgcagaccagtgatcaatgctggggatggagtcggagagcaccctactcaggccctgctggacatcttcactatccgggaagagctggggactgtcaatggcatgacgatcaccatggtaggtgacctgaagcatgggcgcacagtgcactccctggcctgcctgctcacccagtaccgtgtgagcctacgctacgtggcacctcccagcctgcgcatgccacctagcgtgtgggactttgtggcttcccggggcaccaaacaggaggagtttgagagcattgaggaggcgctgcccgacacggacgtgctctacatgactcgcatccagaaagagcgatttggctccacccaggaatacgaagcttgctttggtcagttcatcctcactccccacatcatgacccgggccaagaagaagatggtggtgatgcatccgatgccccgagtcaatgagataagcgtggaggtggactcagacccccgagcagcctacttccgccaagctgagaacggcatgtacatccgcatggcgcttcttgccaccgtgctaggccgtttctag

SEQ ID NO: 4097 - DNA, 1400 bp, Cricetulus sp.
tatcatttatctacggttggcaattgacacttttgctgctatcagttgttccattcatcgctgtatcaggaattgttgaaatgaagatgttggctggaaatgccaagagagataaaaaagcactggaagctgctggcaagattgcgacagaggccattgagaatattcggactgttgtgtccttgacccaggaaagaaaatttgaatcaatgtatgttgagaaattgcatgaaccttacaggaattcggtacagatggcacacatctatggcatcacttttagcatttcacaagcgtttatgtatttttcctacgctggctgttttcgatttggtgcttacctcattgtgaatggacatatgcgcttcagagatgtcattctggtgttttcagcgattgtgtttggcgcagttgctctagggcatgccagttcctttgctcctgactatgcaaaagccaagctatctgctgcacacctattcagcctgtttgagagacagcctctcatcgacagctacagtggagaagggctgtggcctgataagtttgaaggaagtgtgacatttaatgaagtcgtgttcaactatcccacccgggccaacatgccagtgcttcaggggctgagcctggaggtgaagaagggccagacgctggccctggtgggcagcagtggctgtgggaagagcacagtggtccagctgctcgagcggttctacgaccccatggccggaacagtgctcctagatggacaagaagcaaagaaactcaatatccagtggctccgagcccaacttggcattgtgtcccaagaacctgtcctgtttgactgcagcattgccgagaacatcgcttatggtgacaacagccgggttgtgtcccaggatgagatcgtgagggcagccaaagcagccaacatccaccccttcattgagacactgccccaaaaatacaaaacaagagtaggagacaaggggactcagctctcaggaggyyagaarsagaggcttgctatccgtcgcgccctcawtagwsarcytcgkrtcttgytgctrsatgwwsycacgtacarmyctskmtactgagwgttsaamaggttgtccaggaagctctggacaaagccagagaaggccgcacctgcattgtgatcgctcaccgcctgtccaccatccagaacgcagacttgatcgtggtgattcagaatggcaaggtcaaggagcatggcacccaccagcagctgctggcacagaaaggcatctatttctccatggtcaatattcaggctggtgcacagaactcatgaactcttgttacagtgtatttttaaaataaattcaaatcattttacactttgtgacatgtagaagaagtttctcattgaagccataaaatataaatctacc

SEQ ID NO: 4098 - DNA, 600 bp, Cricetinae gen. sp.
cgtgcggtagccaccctcggtcgatccccggcggtggtctcggcgacccgaggccgagaggaagcgctgttcccggattcactagcgggccggggcccgggattctctgggtgcctcggaacttttccttctgcggaagccctcggtccccagcggtcgtctcggcgtctcgaagccgagaggaggcgctgtttccggcctcactgcctgctagttcccggttccttgtagggtcagacttttgtttttcttcgacgtgtcctcccatcccgggctcctgcctccgggtccttgcccgagaggatgccggtgtgtgccgatcttttctgcatgtctacctcgctcttggtcctatcacggttatgaggtcgaccagttgttgctttgatgttcggttctctcgttgattgggacaatatttggggcacttcgccggtcccgacttccagaatttccgtgtggtctgtgaatttatcaccgctacactgtcatcatattccagttttgcaatctgctctctttgtacctgcagataggtactgacacgcttgtcttgtgagtgggtgacattagtaaaggactgctctcgggctttttctg

SEQ ID NO: 4099 - DNA, 642 bp, Mesocricetus auratus; identical to SEQ ID NO: 457

SEQ ID NO: 4100 - DNA, 600 bp, Mesocricetus auratus
  misc_feature (461)..(478): n is a, c, g, or t
ccaagggcactgacgttttccctgtactgagctctgtgctgaaggaccccaagttcttctccaaccccaacgactttaacccccagcacttcyyggatgacaagggacagtttaagaagagcaatgcttttatgcccttctccgttggaaagcgatactgttttggagaaagcctggctaagatggagctcttcatcttcttcacaaccatcatgcagaatttctgcttcaagtccccacaggcaccccaagacatagatgtgaccccacaatatttcagctttgccgcaatccctccaaaattcaccatgagcttcctgcctcgctgagcgggaactctgatgggtggagacaatgagcatgtccagaaacagggcggggctaatggggtggggccaatccgggtagggctaaaggagagcatgaaaattagagggaagtctggggcctgaagtattacnnnnnnnnnnnnnnnnnnctgagcagagtgatcaccttcctgaagacgggttcttcaaagttgggaagagaggctgggatgccttcccgtcgtatctgaacaccgatcgtaataattaaagctattgttgattgtgcaag

SEQ ID NO: 4101 - DNA, 600 bp, Cricetulus sp.
cctcgtcttggtgacttcckkctccgccatggcccgtacgaagcagaccgcccgcaagtccaccggcggcaaggccccgcgcaagcagctggccaccaaggccgcccgcaagagcgccccggccacgggcggcgtgaagaarccgcaccgctaccgacccggcaccgtgacgctgcgggagatccggcgctaccagaagtcgaccgagctgctgatccgcaagctgccgttccagcgcctggtgcgcgagatcgcgcaggacttcaagacggacctgcgcttccagagctcggccgtcatggcgctgcaggaggcgagcgaggcctacctggtgggtctgttcgaggacaccaacctgtgcgccatccacgccaagcgcgtcaccatcatgcccaaggacatccagttggcccgtcgcatccgcggggagcgcgcttgagctctctatcttctccctgtcccccacaaaggctcttttcagagccacactacaccttcccggaaagagctgtttgactttagtttcctctgctcccctgtgagttactgtgtaatgaaactttttctcatgaacaccttcctagtaaagttgcaggatcc

SEQ ID NO: 4102 - DNA, 600 bp, Cricetulus sp.
acgcaagaagtggatccactgctttgaggatgtcacggccatcatcttctgtgtcgccctcagcggctatgaccaggtgctccacgaggacgaaaccacgaaccgmatgcaygagtcyctsawgctyttygacwscatctgyaacaacaagtkkttcaymgayacstcyatcatyctsttyctcaacaagaargacmtmtttgrsgagaagatyamsargtcmccmytgaccatctgcttycctgaatacmcaggcyccaryrcctatsacagawgcwgctgsctcacatccarrsrcagtwtgaragyaaraacmrmtcasctmacaargaaatctaywsycaywtsacytgtgccacmgacacsaayaayatccagktkgtmttygaygctgtsacsgacrtcatcatygccaamaatctscggggctgyggmytstactgascyctkgcctcctgymyagcmwsctkytsactkctycmctggacycwkwgctytgmtryyactcgatgctctgtgcactgagggaaaacccagaggctggccctgggggaggaggaagcaccctctgagcatccccaccctaccccactccagagg

SEQ ID NO: 4103 - DNA, 1400 bp, Cricetinae gen. sp.
gacctgcccaattccttcgaaggaccagttaccataactattgtcaaccgtgatggtacccgctacagcaagaagggcgagtatagaacacaccaagaagacattgatgcctcaaataccacagatgatgatgtcagcagcggatcctccagtgagaagagcacctcagggggctatgttttccacacctaccttcccactatacactcaactgcagaccaggatgatccctacttcatcgggagcaccatggccaccagagaccaagactcatccatggatcccagggggaattccctcactgtgactgatggatccaaattaactgracactcaagtgggaatcaagacagtgggsywaacwcaacttctcgtcctgggaggaaaacctcgagattccagaatggctcatcgtcttggcatctctcctggcgctggctctgattcttgctgtttgcattgctgtcaacagtaggagaaggtgtggrcagaagaaaaagctggtgatcaacagtggcwrtsgammsryggwssacwggaagccaagtgagctcaacggggaggccagcaagtctcaggaaatggtgcrtkkggtgaacaaggaaccmtcagagactccwgaccagtttatgacagckgatgaracccggaatctgcagaaygtrgacatgaagattggggtgtagtgcctataccagyaayttggaaagacaccaaaatcgcaracwtgtcaatactgggagctgggacccttaacagatgcaatgtgctactgattatttttattgggggtagtttctgyryaaaattttctattcmytttkcattttgttaawagtcyrttccaatttatraaaacagcattgctttctgmaatgagggcccaaagaataytccattaagawttygaytcttccagctccttcctagaggtcttgcattcccaakggatgctatggayggcttckatcamwtgcawattcytggtccctattgaaycttttccctaamctaagtcccargtaacagycacccagccagggacttaccccagggctwmgaggkattggtctctgggaggaaatttgaatgggtccatattgcctctcmrcaagyccartccttgggyattgttttccagttgggtgggagatcaggtgtactggttacacacctttttatagactcccctttctgctggaaaattttcagatgcttctgagagatccccaaagggtgaagctatttatctgtagtaagctatttatctttgtttttgaaatatcaaaccctggaggtcctttgtgcagtatgacttttgactttttttaggttactttgtcagaagcataacagggtataagttgattcataataaacacctgtcaatcttccatctt

SEQ ID NO: 4104 - DNA, 600 bp, Mesocricetus auratus
gagaacaattgacaatatttatattccagctcttggcaattttacctatgatttttcctttaaatcaagtgtcatcacgctgaataccaacgttggactttataaccggtcagacatcgttgctcatttcctttcttcctcttcatttgtcacggatgccctgcagtacaaattagagggtacttcacgtctgactcggaaaagaggattgaagctagccacagccgactctctcactaacaaatttgtaaagggcaatcatgatagcacctttagcttaaccaagaaaaacatggaagcatcagtgaaaacaactgcaaacctccatgctcccattttaacaatgaacttcaagcaggaacttaatggaaatgccaagtcaaagcccattgtctcatcatccattgaactaaactatgacttcaattcctcaaagctgtactctactgctaaaggaggtgttgaccacaagtttagcttagaaagtctcacttcctacttttccattgagtcatccaccaaaggaaatatcaagggatctgtcctttcccaggaatattcaggaagtgttgccagtgaggccaacacatacctgaattc

SEQ ID NO: 4105 - DNA, 600 bp, Cricetinae gen. sp.
gttttgtcatataaaaagtttataaatgtttgctatctgactgacattaaataggagctatgatgagcacccctgcagggtttgttctctgttctctgcttctggcccttgtgtttgttgccagggtaacttgggctcacacaaggtaggtaatggctaatttcacatgccttcccctgatgggcctcagttcttacctctggtcatagattactttttttctactgccttttcatttttcccttatatgtactcagccctgctgaaccacaaaggcatccctggggggaggttgtatgtaggtagggctcatgttctgaaagaggttttcccccaccccctccctcccccctcccccttcctccctccctcccttctttaatgtgtatcaggagtttgcctgcatgtacttgtctgtgtaccacatgctttgccctcgagtcaaaagaggggctcagatcccctgaaattgaagttacaaatgtttgtgagccattatgtggagtctggaactcaaacccaggtcctctgcaagaagagctagtggtcttaaccagtgattcactgcaccagccccagtggaaatgtcttcctgaattc

SEQ ID NO: 4106 - DNA, 600 bp, Mesocricetus auratus
gcctgcctcccggggaagctgtgcgacccagactcagactacaaccccggagaggaatacacttgcggaagcaacttcgccatagtctatttcatcagcttttacatgctctgcgctttcctgatcatcaacctcttcgtggctgttatcatggacaattttgactacctgacccgggactggtctattctggggcctcatcacttggatgaattcaaaaggatatggtcagaatacgaccctgaagcaaagggaaggataaaacacctcgatgtggtcactcttctccgacgaatccagcctcctctggggttcggaaagttatgtccacaccgagtagcttgtaagagattagtcgccatgaacatgcctctcaacagtgacgggacagtcatgttcaacgcaaccctgtttgccttggtccgtacggctctcaagatcaagactgaagggaacttggagcaagccaacgaagagctccgtgcagtgataaagaagatctggaagaagacgagcatgaagctgctggaccaagtcgtccctccagctggtggtcagtgtggcctctgcttcctaagtccgtctcggtcgaggagctag

SEQ ID NO: 4107 - DNA, 600 bp, Cricetulus sp.
gcaacatcagccctggatacagagagtgaaaaggttgtccaggaagctctggacaaagccagagaaggccgcacctgcattgtgatcgctcaccgcctgtccaccatccagaacgcagacttgatcgtggtgattcagaatggcaaggtcaaggagcatggcacccaccagcagctgctggcacagaaaggcatctatttctccatggtcagtgtgcaggctggagcaaagcgctagtgaactgtgttaaatatttttttaatatttgtattaacacatagcatttaaccaaagttaaaaagaaagtacgtaccagaataaccagttatctatttcctgtcattatgagaagcatttagtccagtttagagttttcagagactttgtaattaaagkgacagaaatagatatatcatcaaatggaaaggaatcatttaaattgcactataaaattatacaagaattaaaagtaaatgtttcataatatatacttttatttatactttctcatttgtaactataactgatttccttgctaaacaaatcatgtgtgtatcaaaaattaatgaaatgtttgtataaagtatatatagtgaaact

SEQ ID NO: 4108 - DNA, 600 bp, Cricetulus sp.
  misc_feature (355)..(376): n is a, c, g, or t
  misc_feature (478)..(509): n is a, c, g, or t
gggcctgcagactgaccactgcaggagattaactgagtcttgcctttactctagcaaagcagatagctgacatggccaatgtgatgtatacactgcaaatacaccattgtacatagaagtgtgtcagccacacatcgccaagcatatttcacataagcaaggcctaacagctaaacagctttggagatctgagtttctgcatcagtagctgtaggttaggataaaaacacagtttaagatgtatatttttaagaaacaaacccttaagtctacaataattagacactatttatttacaaatgttttattaaaaattgcccaaatcagacaggcattgaggcacatgcctttaagnnnnnnnnnnnnnnnnnnnnnntaggcagatctctgtgcattcaggtcagcctggtctacatgatgacttctaggtcatctagggctatatagtgagaccttggcttaaaacaataatgacatnnnnnnnnnnnnnnnnnnnnnnnnnnnnnnnnaaaacccacatttttagaaagcaagaaaacacaaaaagttacctgaatccagttttaagaaatacataggtcagtctggttaaaaaaaaaa

SEQ ID NO: 4109 - DNA, 1400 bp, Cricetulus griseus
  misc_feature (774)..(806): n is a, c, g, or t
aggcggtatcccacgtgcaggaagagggacgcttgcagtctgcgggacgtgtgcagtctgcgggggcgtatgcaggtggtgggcaacctgggcggaccttttgcgctcgccccaaatccttccctctataaaggcagcgctctgcacgcttctctccatcacgccttctcctagcgctcgggtttctgtgtttcatcgctcctcagccggtctccaaccgtcgtcttcactcgccatggaccccaactgctcctgtgctacaggtaagggggactgctgacgggcctccgcagcctaagtttctccgagagcwwggcaaggtgtttggggtcccttctctagtcactttcagggtactacctgctgccctttcccaacgaattctggagaaccccttttaaccagtcttcacccaagctgggtcggggatttgcacttgagttcctatgggaactcctgcgtccaggtgcgtcaggtcgcgctaactgccttgtccctgcagatggatcctgctcctgcgctgggtcttgcaaatgcaaagagtgcaaatgcaccacctgcaagaaaagtaagttggatcctctctatccctttacccttcgctctgcatcagcccctagtccgccctaccatcccgggagcatccaggtgtggtgcctctgactcagtttttccgctcacggtcaactcttctcctctaggctgctgctcctgctgcccggtgggctgtgcgaagtgctcccagggctgcgtctgcaaagaggcttcggacannnnnnnnnnnnnnnnnnnnnnnnnnnnnnnnntcagctgcctgtaaatagagcaatgtgtagaaacgtatttttttttacaaccccggcctattcgccacacccctttctataaagcatstaattgataataaaagcgttgacttgattaactcagcttgtctttgtgtgcattggaaataagggactgggcggagtttgaaatggaactgcagaggcttgagttctggactcaaatactagtttgtggcttgggctgctcaggttacctctcgggcttttatcctggaagtggtgggcaagaagatggcactagtcacacaaatgtgccagtccccactgtgcatgtgtatattggggattaaacctagggcttccggcactaatgagtcacacccctaccccctagatacaagatactctttctctctccaaattcagttggattttaggcttcacattgacttaagtatggaatgccagtacctaaacttaagtaaataaaacaaaaagtaagaattagaggggctggctattggtgcctgcctttaatccagcagaggctggtgaatcctgagttgggaggctagcctcatctacagaacaagttctggggtggccagggat

SEQ ID NO: 4110 - DNA, 600 bp, Mesocricetus auratus
gcggtgttcgcttggttccagtggggctcgccgcgcctcccgcttctcggtgctcgcctcgtctsagctccgaccccatggcggctctggtgttggaggacgggtcggtgctgcagggccggccctttggggccgctgtgtcgactgctggggaagtggtgtttcagaccggcatggtcggctacccagaggccctcactgacccttcctacaaagctcagatcctggtgctcacgtaccctctcatcggcaactacggcattccctcagatgaagaggacgagttcggcctgagcaagtggtttgaatcctcggagawccacgtggcaggactggtggtgggagaatgctgtcccacgcccagccactggagtgccacctgcaccctgcatgagtggctgcagcagcatggcatccccggcctgcaaggagtagacactcgggagctgactaaaaagttgcgggagcaagggtctcttttggggaagctggtccagagtgggacagagccttcaaccctgccgttcgtggaccccaatgccaggcccctggcaccagaggtwtckattaagaccccacgggtattcaatgcagggggtg

SEQ ID NO: 4111 - DNA, 600 bp, Cricetinae gen. sp.
aggtgcggcctcagcctcccttgactccggagggccctctgcctcctgtgcggcctgctggcgctactctggaaagacccaagactctctctcctgggaagaatggggtcgtcaaagacgtctttacctttgggggtgctgtggagaaccccgagtacctagtacccagaggaggctctgcttctcaaccccatcctcccgccttgtgcccagcctttgacaacctctattactgggaccaggacccatcagagcgggggtctccaccaaatacctttgaagggacccctacagcagagaaccccgagtacttgggcctggatgtgcccgtgtgacgtcacgtttgtagaggccctgttctgccttcagagtgagggaggcctggtctccttcaccccaaagcagggggaggtcctctggccacattatttccagggcagcctgcttgccaggagcccaccctgcggaaccttccttgctgcttgagtcctgagtggttgacaggggccccctggttggaagaggtggcacactgaacagcctcattggatcacagaccctgccctgacaccctgtagggtccaggggcatcacagtcat

SEQ ID NO: 4112 - DNA, 600 bp, Cricetinae gen. sp.
gaccaaatcagaagagaacartatgttccaaaycaagmatttgttaactcrgacctccttgagaagaacaaatayagaaagatctattcttttactcttgaaccccgtactattgaggactttgagtcyatsaatrcctaccttcagacrtcrccagcatcygtrtttacaagcaaatcattttgttctttgcagaccccagaaggggttcactgtttagtgggctgcaccctcacctatagghrattcagttayaaggacaatgtagatcttgtrgagttyaagagtctgaaggaggaagaaatagaagatgtrctsaaaactatatttggcatttctttagagaaaaaacttgtgcccaarcatggtgatagrttttttaccatttagaataagcagcagtagaagttttcagtgtccctccawrkacytggatttttaatgataaattttcaaacagatttacagtgcatgtaatcacatgagcctttttgcattcattccgcagctgactagttattggtaaataataatttcttgtctcctctctacccctatattttcattagcagtaatcacaccttggataaacctcattgg

SEQ ID NO: 4113 - DNA, 552 bp, Mesocricetus auratus
  misc_feature (335)..(359): n is a, c, g, or t
ttctgctgatagatcattctcaggatattcagctgcaatctggactaaaggctaatatggagatccaaggtggtctagctattgatatttcaggttcaatggaattcagtctgtggtatcgtgagtccaaaacccgagtgaaaaatcgggtggctgtggtaatagacagcgctgtcacagtggactcttctttcgtgaaagctggcctggagagcagggcggagacagaggcgggtctggagttcatctccacagtgcagttctctcagtacccgttcctggtctgcatgcagatggaccgggctgaagctcccttcaggcaatttgagacaaannnnnnnnnnnnnnnnnnnnnnnnnggctatgtctctcggagaagaaaagaaagcctagtgtctgggtatgaactcccactccatcaagagaactctgagatgtgcaacatggtgttcccccctcagccagagagtgataactcgggaggatggttttgaaactgatgagtggtgtttccctcagatccatttctttgagagtgatatacttcgacgt

SEQ ID NO: 4114 - DNA, 600 bp, Cricetulus griseus
gagatggcagacagatatgatcgcttgttggagacctgctctatcgctcttgtgggcaaatacaccaaaytctcagactcctatgcatctgtcattaaagctctagagcattctgcattggctattaaccacaagttagagataaagtacattgattccacagacctggagcctagcaccctgcaggaggagcctgtgcgttaccatgaggcatggcagaagctctgcagtgctcatggagtgctggttccaggaggatttggtgttcgaggaacagaaggaaaaattcaagcaattgcctgggctcggaaacagaagaagccttttttgggtgtgtgcttaggaatgcagctagcagtggtagaattctcaagaaatgtgctgggatggcaagatgccaactctacagaatttgaccctaagactagtcatcctgtggtcatagacatgccagaacataaccctgggcagatgggtggaaccatgaggctgggcaagagtagaaccctgttccagaccaagaactcagtcatgagtaaactctatggagacacagactacttggaagagaggcaccgccaccgatttgaggtgaatcca

SEQ ID NO: 4115 - DNA, 1400 bp, Cricetinae gen. sp.
tggatgtgatcactggcacatcatttggagtgaatgtcgattccctcaacaacccagaggatccctttgtgcagaaggccaggaagattttaaagtttaatttttttgatccctttattctctccataatactgtttccattccttaccacaatatatgacttgttaaggttctccatttttccaagacaatcaacaaactttttcaaaaaatttataacaacgatgaagaaaaatcgccttcattcaaaccagaagacccgaatggatttttttcagctgatgatgaacactcagaattccaaaggcaaagagtcccagaaagctctttccgatctagaaatggcagcacaagccattattttcattttcgctggttatgaatccacaagcacctccatttgtctcgtattgtatgaactggccacccaccctgatgtgcagaagaaacttcacgatgagattgacagcgctctgcccaataaggcacctgtcacctatgatgtcctgatgggcatggagtacctggacatggtgataaatgaaggtctcagattgtacccaattgctaacaggctagagaggatctcgaagaaggctgtagaaatcaatggactgttcattcctaaagggattacagttatggtaccaacctatcctcttcatcgggaccctgagtactggccagagcctgaggagttccgccctgaaaggttcagcaaagagaacaagggcagcattgatccttatgtatacatgccctttgggaacggacccaggaactgcattggcatgaggtttgccctcctaagcatgaaactggctgtcgtcagtgtcctgcagaacttcaccctccagacttgtgagcaaacagagaaccacctgaagttcgccaggcaaataattctccagccagaaaaccccatcatcctgaagatcatatcaagagataaacccataaccggagcatgaatttccctcaggaattatgctatattcttcaatgggactgtgtcacagaacaccagcaaatttaatttagcacagaatgtagcacagatgaaattggcttactgaactttcattgatgattgagaactcagtacttcactgaatgtgttcagtgtctatagggagtattatctattgtgtaattcaatggaaataattaagtcaatgatagttgtggagattcatcttctgattctcttgtaaccatctacactaattgcaattagttccatcaattctgagctccaactgtagtaactgtttctttatagttctatcaataatttttatgaaaatagaaactattgtgttgactgttagtaaaaatatatcaaactgtttctttgtaaaattttatgatattgaggatataaataaatatctccttca

SEQ ID NO: 4116 - DNA, 440 bp, Cricetulus griseus; identical to SEQ ID NO: 474

SEQ ID NO: 4117 - DNA, 357 bp, Cricetulus griseus; identical to SEQ ID NO: 475

SEQ ID NO: 4118 - DNA, 902 bp, Cricetulus migratorius; identical to SEQ ID NO: 476

SEQ ID NO: 4119 - DNA, 1223 bp, Mesocricetus auratus; identical to SEQ ID NO: 477
  misc_feature (333)..(350): n is a, c, g, or t

SEQ ID NO: 4120 - DNA, 197 bp, Mesocricetus auratus
tcaactcatatatggattttagacataggatggatcaggatagtgccagtctgcacttccactgatcgcgcgtcagggaaacaggaaagaacctaaaagatatgcatatatgcatagtacccaagagaagaggattgagacaagatcctctgaatggatggggaacacggcgagggctggggaggagtaggagctgg

SEQ ID NO: 4121 - DNA, 248 bp, Mesocricetus auratus; identical to SEQ ID NO: 479

SEQ ID NO: 4122 - DNA, 235 bp, Mesocricetus auratus
  misc_feature (76)..(93): n is a, c, g, or t
  misc_feature (183)..(183): n is a, c, g, or t
agcagaaaaaacacaataaaatgaaagtagaaaagaaaaaaatacaaagaagtaaaaataatcacgcactctcacnnnnnnnnnnnnnnnnnncacacaccgataccaaagcacaatctccagtgttaatagtgattaaaaaaatacagagtaagtgaaacagcgcaagaaaaatgtgtgatngtctgtgccagccttcctttgtcctgtttgtcccagaactttattctaggtc

SEQ ID NO: 4123 - DNA, 193 bp, Mesocricetus auratus; identical to SEQ ID NO: 481

SEQ ID NO: 4124 - DNA, 185 bp, Mesocricetus auratus; identical to SEQ ID NO: 482

SEQ ID NO: 4125 - DNA, 238 bp, Mesocricetus auratus; identical to SEQ ID NO: 483

SEQ ID NO: 4126 - DNA, 233 bp, Mesocricetus auratus
gaatctctgtgcttaacttcatgaaaactaacgatacaacactgtgtgagaatctccctgcttaacttcatgaaaattaacggtacaacactgtgtgtgatactatgtgctaaacttcatgaaaactaacgatacaacactgtgtgtgaaaccctgtgctcaacctcatgaaaactaacgatacaacactgtgtgtgatcctatgtgctcaacatcatgaaaactaacaatac

SEQ ID NO: 4127 - DNA, 265 bp, Mesocricetus auratus; identical to SEQ ID NO: 485

SEQ ID NO: 4128 - DNA, 272 bp, Mesocricetus auratus; identical to SEQ ID NO: 486

SEQ ID NO: 4129 - DNA, 600 bp, Cricetulus griseus
ctggcctctgccttcaccgtggtgattgcctccaacattggacttcccgtcagcaccacacactgcaaggtgggctcagtagtagctgtgggctggatacgctctcggaaggctgtggactggcacctcttccggaacatatttgtggcctggttcgtgactgtcccygtggccggattattcagtgctgctatcatggctatcttcatgtatggratcctwycatakgtgtgattttgtttcttccagtcgggaaatggctatggggacggtctaacgtgggtatgcgtattcacacctctccacccccactgtttgacacaagcacacccctcccacataccttcccagatggtttgacgccacacactgcttacccaggccacagaagttcatcttccagaattaacctaactactgtacatagtaggtgtatatcaaactgatattgtgatgacataatgtggtgcagttacttatattaaatatatattgtgtacctagaatattgtagcatttattccaaacaaactcagaatgaaagtggagagtaccgcctggaattgcaaatattcttgttaagtgtattttaatgatttc

SEQ ID NO: 4130 - DNA, 596 bp, Cricetulus griseus
  misc_feature (101)..(157): n is a, c, g, or t
  misc_feature (367)..(445): n is a, c, g, or t
gcaacaccaatatggcttctrctytatggtggtgttggyatctgyrtwggkctgtgggtttggggaagaagagttatccagaccatggggaaggatctgannnnnnnnnnnnnnnnnnnnnnnnnnnnnnnnnnnnnnnnnnnnnnnnnnnnnnnnntgattgcatcaaayattggccttcccatcagyacaacacaytgtaaagtgggctctgttgtgtctgttggctggctccgrtccaagaaggctgtygactggcgwctstttcgyaacatttttatggcctggtttgtcacagtccccatttctggrgttatyagtgctgccatcatggcaatcttcagatatgtcatcctcagaatgtgannnnnnnnnnnnnnnnnnnnnnnnnnnnnnnnnnnnnnnnnnnnnnnnnnnnnnnnnnnnnnnnnnnnnnnnnnnnnnngaagacagacaaggtcaaagtttggagccatggggagtgtaattacactataatgcttttgtgctaaaatgactgtctcaaaatagctatgaaaatagccagtttccatggtcacctaagtcccttttcttctggcatgatcgaacaactt

SEQ ID NO: 4131 - DNA, 1400 bp, Cricetinae gen. sp.
  misc_feature (550)..(570): n is a, c, g, or t
  misc_feature (640)..(660): n is a, c, g, or t
ttggctatgatgatgccgtcagcttcagttacaaggcaatgttcgtgaaaaaagaacattttgggggggccatggtgtggacactggatatggatgacgtcaggggcactttctgtggcaatggccctttcccccttgtccatatattgaatgagctcttggtgcgggcagagttcaactcaacccctttgccacaattttggtttacattgcctgtgaattcctcaggacctggctctgagagtcttcccgtgacagaggagttgaccactgatactgtaaagattttgcccccaggaggagaggctatggccactgaggtccacagaaagtatgaaaaggtgactacaatccctaacggtggatttgtgactcctgcgggaacgacatctcctacaacacatgctgtagctctagaaagaaacgctatggctcctggggcaaaaactacaacctcactggaccttctgtctgagaccatgactgggatgacagtgacagtccagacacagacagctgggagagagaccatgaccacagtgggtaatcnnnnnnnnnnnnnnnnnnnnnagaccatgaccacagtgggtaatcagtctgtgacccctgggggagagaccgtgaccacagtgggtaatcnnnnnnnnnnnnnnnnnnnnnagaccatgaccacagtgggtaatcagtctgtgacccctgggggagagaccgtgaccatagtgggtaataagtctgtgacccctgtgggagagaccgtgaccatagtgggtaataagtctgtgacccctgggggacagaycacagccacagtgggtagtcagtctgtgacccctccagggatggatacaactcttgtctatcttcagactatgactctcagtgagaagggaacttctagcaagaaggctgtggtccttgaaaaggtcactgttcctcctagagagatatcagttatgcccaatgaacagaatacagctctaaatcgggagaatttgattgctgaggtggaaagttattcccaggatgggtgaattggcccttatgtaaaagcggagaacaggatgctctcctccagctttatcgtcctgttcccaggatatgtgcctttttcttttgaaaatggcttcactcttactaatggaaaccactcctttgtcaactcaatagtccttctaacaaatctcttcctcttaaaaaaaagaaaacctaggacaccctgttatggatcaagaatgttgagctccattagtggcaaatcctagagaaaaactcttgttttttcttctatgtggtatgacagaagccatctcatattgccacccatgaaccatttgtgggacaaggttggcaccaaagccatggggcaatctcctttctgtcgaataaattggaagcatgag

SEQ ID NO: 4132 - DNA, 600 bp, Mesocricetus auratus
atatgtgtattttaaataaaagatctccagtttcccttttaagatccagaaggacaggaaaacttcgaagagatgttgtttaaactgtttacatggtgtttcccatctctaagaggcccctctgaagtgagagagaagcgcttgcctggatttggaaagctcactgagaaagcgctaatccaagtacgtgagaagaaatacgcgaagcggccagtggctgtggacacaaccagaggctgaagccttctatcgtgtagaaagctttttgcccttcaaagacagagactgtgtagagaagaaggatagttggacgagaacgaagatgggaaatggaataaaacagttgatcaccgtggttgggaaaatcggttggtggagtggggactgaagaccacaaagggaatgcccccaaactcccttgttgagcataaaacraaatattctctaccgctgagctgttgtttttggttttatatgagaagaggcaacctctctggtcagacaatttatccgagtcgtgtagagaggacgtcttcctaactcttaggaagatctattaccttttgtggaagacaaagggtcctttcagggtgcaagctt

SEQ ID NO: 4133 - DNA, 600 bp, Mesocricetus auratus
cttacccagacagtacaccttcctcctcagagttccctctgacccagtccctctgttcccagggtgtggaggatgccttctacacactagtacgtgagattcggcagcataaactgcggaagctgaacccacccgatgagagtggccctggctgcatgagctgcaagtgtgtgctatcctgacagcaggtgaggcagggaccagccgacatctggcagtggccccagctagccagatgaacttcatatccactctgatgtccctgctccccccatcctgccaattcccctgctgcggtcagtggtgtcctttgtgcccgtctcggcacaggctcacgacgtggaggtgccggatgcagggaggaggtgcagacggaaggaaggaaagagaagggaaggaaggaaggaaacgatgctggagccagtccagtccagggatggtggacagaggtgaccaagaccttcgcatggacaatttgaacagactgtcatgaactgtccctattgccactggcaccccagtcctcaacccctctcagttcctttgggcgcctatggggcacaggttgaatcacagtaaattatttgatggtcaaaaaaa

SEQ ID NO: 4134 - DNA, 600 bp, Cricetinae gen. sp.
argtaccagcccgarcaacctaayctggtataccagatggccagaaccaccgatgagttagatcatgtagaccagaatgagctggtcagtgccagtgactcccagacaggctttttaccagtaactgagaacttttctctgaaatccaaactctcacccaagaatatggaaccaacccaattctcaggcctaattgtgaactgttcaacaaccctcctaactaatcttatcatcatcgtgtgcattgtggccgtgctcccaagagagcctctggctgaagggacgctgtgggcagtctttgtaatgacagggtcagtcctcctctgcatgctggtgacaggcatcatctggaggcagcctgaaagcaagaccaagctcacatttaaggtaccctttgtccccgtacttcctatcttgagtatcttcgtgaatgtctatctcatgatgcagctggatcaaggcacatgggtccggttcgcagtgtggatgctgataggcttcagcatctacttcggttacggactgtggcacagtgaggaggcgtccctggctgctggccaggcaaggactcccgacagcaacttggaccagtgcaaatga

SEQ ID NO: 4135 - DNA, 600 bp, Phodopus sungorus
agcgtcatcggctctgtcttcaacatcacagccattgctatcaaccgctactggtgcatctgccacagtgcaacctaccaccacgtctgcagtcactggcatgcccccttctacatcggcctcatctggctcctcactctggtggccttggtgcccaatttctttgtagggtccctagagtawgacccacgcayctattcctgcaccttcawccagacagccagcacccagtatactgcggctgtggtggccatccatttcctctttccaatcgctgtggtatccttctgctacctgtgaatctgggtgctggtgctccaggcccgaaggaaggccaaggctgacagtaagctgcacctaagacccgttgacttgcccagtttcctaaccatgtttgcagtgtttgtggtttttgccatatgctggggccccctcaactgcatcgcccttgcagtagccctcaacccagaggtgatggctctccgggtaccagaagggcttttcgtcaccaactacttcctagcttacttcaacagctgccttaacgccattgtctacgggctcctgaaccagaacttccgccaggagtacaagaggatc

SEQ ID NO: 4136 - DNA, 1399 bp, Phodopus sungorus; identical to SEQ ID NO: 494
  misc_feature (348)..(391): n is a, c, g, or t

SEQ ID NO: 4137 - DNA, 600 bp, Mesocricetus auratus
gactacgagactcacgagtttcatttgccaagtggagtgaaaagtttgaatgttcagaaggcgtccactgagaggattaccagcaatgctaccagtgacttaaatatcaaagttgatgggcgtgcgattgttcgtggtaatgaaggcgtgttcatcatgggcaaaacyattgaatttcacatggggggcaatgtggagctaaaggccgaaaacagcatcatcctcaatggaactgtgatggtcagcccaackcgcctgcccagttcctcaagtggggaccagtygggaggtggtgactgggtgcgctacaaactctgcatgtgtgccgatggcacgctcttcaaagtgcaagtaacgggccacaacatgggctgccaggtggcagacaacccctgtgggaacactcattagaagctccagccccagggtcaatatgatccgatctcagcttgaccttttcttttcatgaatgcatgtgaaccaggttttgcagtttgtgataacttgtatttgaactggggagcaccactgtatctgttacgtgctctccatatttaagggatttttgagtgcctaaattctaatatgctttattaagtt

SEQ ID NO: 4138 - DNA, 1400 bp, Mesocricetus auratus
  misc_feature (1143)..(1160): n is a, c, g, or t
gggcacccacatagagaggcccgagagccagcttgtccacaggatcgggatttatggctggaggaagcgctgtctctacctatttgttcttctcttgctcatcatccttgttgtgaatctcgctctcacaatctggattctgaaagtgatgtggttttctccaataggaatgggtcacttgcatgttacgcaagatggacttcgcctggaaggggaatcagagtttttatttccactgtatgtcaaagaaatacgctccagagtggactcatctctgcttctgcagtcaactcagaatgtgacagtcaatgctcgcaactcagaaggggaggtcacaggcagggtgaaagtgggtgcccaaatggtagaagtccagagccagcacttccagatccgttctgaagacggcaagccactgttcaccgccgaggagcggggtgtcatggtcgataccggcagactgcgagtaaccgggccagaaggcgctattttcgaacactcagtggagacaccccttgtcagagctgacccatttgaagaccttcggttagaatccccaacccggagtctaagcatggatgccccaaggggagttcacattaaagctcacacggggaagatggaggccctttctcaaatggacatcatcttgcagagtagtgatggagtgctggtgcttgatgctgagactgtgggtttgcccgagttggagcaagggacaccgggtccctctggcagttctaagggattctatgagatttgtgtgtgtcccgatgggaagctgtacctgtctgcggctgatgaggccaccacctgcgaggaacacagccacatctgtctctgaccactacctcttctgcagaacagatgttgtcttggtgagctgtggcctcagccttcatgtccctggcagctggacgggagctggtagattcactgctaagcacttagaagcttgcagggggagtgtgcccatggaaccattgggctagagtgcctgctttcagcatggcacaaagaaatgtcaagaacttagtcactggattttcatctttctagcctccttccacatctctcgtgttgaactgctgtctgcaagcagtttatagtactcaacagcagacatctatacacacacacaannnnnnnnnnnnnnnnnnctgactagtggattctaaaatgccccaactctgcacaacccttcctttacgttaagcctcaagtgctcccttcagtcaagtgcagtgtgtcaggttttactaagagatctccagagtttgaagggagtctgaagttgatagattttcaatatgtagttaggggaagaaattacacaaaattagtcatgctttttatacacataccaatgagcaataaaatgacattgcttttcagaccag

SEQ ID NO: 4139 - DNA, 964 bp, Cricetinae gen. sp.; identical to SEQ ID NO: 497
  misc_feature (854)..(869): n is a, c, g, or t

SEQ ID NO: 4140 - DNA, 600 bp, Cricetulus griseus
ggggcccagcaggaagaactatgaacgcttcctgccccctgatgccttcatccacgtggatgactttgagagcccagcagacctggctcagtacctgcagaagctagacaaggacagccagagctaccagcgctacttccgctggagggagacgctcaggcctcgcttgtctagcatggcccttgccttctgccaggcatgcaggcagctgcagtgggaccagaggtaccagacggtccacagtgtggcctcttggttccactgaggtggctggccagagtcctgcaggcagtgtcccactcgaaagtcatcctctgtcgcccctggtgctagacactcccttgatgagcatctcagctgctcagagccttgattctggggtcttcatctttgctcactggggatgtgagttcccagaagcctgagctgtatcgagagaccctgctgctgacacactctacttcccagagccccaccctctcccactggtgggtggtgggtctgcctcaattgctcctggtgcacgacataagtaacgtctgaggtgcttgcagggatgtggtactgtcacagtgatccagatgagaccttattctgtca

SEQ ID NO: 4141 - DNA, 709 bp, Cricetulus griseus; identical to SEQ ID NO: 499
  misc_feature (178)..(195): n is a, c, g, or t
  misc_feature (263)..(284): n is a, c, g, or t

SEQ ID NO: 4142 - DNA, 1400 bp, Cricetulus sp.
  misc_feature (482)..(506): n is a, c, g, or t
ggtacagacaacgctggcctctgtccaagagctactgagacagcagcagcagaaggtccaagagctggcccatgagctggccgctgccaaggccaccacatcaaccaactggatcctggagtcccagaatatcaatgagctcaagtcggaaatcaactccttgaaagggcttctcttgaataggaggcagttcccgccctccccatcagccccgaagattccctcctggcagatcccagtgaagtcgccctcgccctccagccccgcggccgtgaaccaccacagcagcagcgacatctctcctgtcagcaacgagtccacatcatcctctcctgggaaggagagccacagccccgagggctccacggccacctaccacctgctgggcccccaggaggagggggagggggtggtggacgtcaagggccaggtgaggatggaggtgcagggggargaggagaagagggaggacaaggaggagnnnnnnnnnnnnnnnnnnnnnnnnngtgagccacgtggatgaggaagacgtgcttggggtgcagagggaggaccggcggggcggtgacgggcagatcaatgagcaggtggacaagcttcggcggccagagggcgccagcaacgagagcgagcggcactaggtgggcgcttgcttgcccgccttcccagcgccccaggacatcagtggcaggtgggcatgagcgtggctctgcctccatgagggtggctggcaacccaggtaggggtgaggctgtcctcagctgcagcagtgtggggttcctccgttcaccakcctcccaaacacctcccccagccctggtggctctggctgttggaggccaagcggaggactccagagccctgtgctcacacccctgcctacccctcctggacaggtgtcctgtccaggtgtgtcctctgaggatcttgactacctgacaccatgcatggccagagctcatgtcatctcctgcctcctgtcaccttagtgcagggggctgtggcccccatggtcttgctgtctcctactgtgccctggcttggcctggggcttcttttttgcctgttccaaaagccagagccctggacctgctcttcatctgtgggcctgccaggacccagcctccctacaaccaggtcctggctgacagatgctcccacctgccctgttgtcctgtataccacacaagaccatcctcgcttgctgtgtcatggtttggctactcagtggtgaggtgtgcttctccctcctgcagtggagccaggcagcagggccttcctgaccaacagccacatctgtcctgcccactgagaaacatgttcatttatgtgatcatgtatagatttcagaatataagatatgactgtacatattgtaataaatatgagttgccatattt

SEQ ID NO: 4143 - DNA, 576 bp, Cricetulus griseus
gagctgcagcagaartttcgaagtgacaccatcacagaggaggagctggtggggctcatgaacaagtttgtggaagacacaaagaraggratgcatgagaaggaaggctggcctaatagtgcttatggggtgaccaagattggggtgacagtcctgtccrgaatccatgcccggraactcagccagcagaggagagmwgacaagatcctcctcaatgcctgttgcccagggtgggtgagaacagacatggcaggaccaaaagccmccaagagyccagaagaaggagcagagacccccgtgtacttggcccttttgcccccagrtgcagaggggcctcatgggcagtttgttcaggagaaaaaagtagaacaatggtgaactcaactcttccccyctccccayagcaccctctcyctagytgtawcctgtcttggtgaggactgtggacatttatratctgctgacacaatatactaatttaactctcattaattacwtgagtcattgacccttgtrattctrtgaawtaytttatgattctgtctgtgwtacaggaaagagaaaaagtaaattctc

SEQ ID NO: 4144 - DNA, 600 bp, Cricetulus griseus
ctcctggtgaagaaggggcgagtggggcaggactgggtcccagcaagcgtgtcttgggatccctgttgtctgactccctgtttcttgaagtgaaagagctcttcctggcagctgtgcgtctggaccctacatccattgaccctgacgtgcagtgtggcttgggagtcctcttcaacctgagtggggagtacgacaaggctgtggactgttttacggctgccctcagtgttcgtcccaatgactatttgttgtggaacaaacttggggccacactggccaacgggaaccagagtgaagaggcagtggctgcgtaccgtagagcccttgaactacagcctgggtatatccggtsccgctataacctargcatcagctgcatcaaccttcggggctcaccgtgaggctgkkgaacactttctggaggccctgaacatgcaraggargagccggggccctcggggtgaggggggcgccatgtcagagaacatctggagtaccctgcggttggccttgtctatgttaggccagagtgacgcctatggggcagctgatgctcgggatctgtctgccctcctagctatgtttggcctgccccagtga

SEQ ID NO: 4145 - DNA, 600 bp, Cricetinae gen. sp.
  misc_feature (295)..(300): n is a, c, g, or t
  misc_feature (501)..(515): n is a, c, g, or t
taccagggagtctggaaaccaaggaaaataccaaatccagatttctttgaagayctagaaccttttaagatgackcctttyagtgctattggtttggagctstggtccatgacytctgacatyttttttgacaactttatcattagtggtgaccgaagrgtrgttgatgattgggccaatgatgggtggggcctgaagaaagctgctgatggggctgcygakccaggtgtagtggggcakatgctggargcagctgaagagcgtccgtggctstgggtggtctacattctgactnnnnnnttgccagtgtttcttgtgatcctcttctgctgctccggaaagaaacagtccagtgctatgcagtacaagaagacagatgctccccagccagatgtgaaggaagaagatgggaaggaagaagagaagaacaagggggatgaagaggaagaaggagaagagaagcttgaagagaaacagaaaagtgatgctgaagatgatggnnnnnnnnnnnnnnnagatgaggaagatagaaaacctactgcagaggaggatgaaattttgaacagatcaccaagaaacagaaagccacgaagagagtga

SEQ ID NO: 4146 - DNA, 600 bp, Cricetulus sp.
  misc_feature (433)..(511): n is a, c, g, or t
actaaagacagtgggtcaatgtcactacaagagacaagaagacagaagaaaacattgaagaaaacacgcaaatttattgttgatggtgtagaagtgagtgttacaacgtcaaagatagttacagatagtgactccaaaactgaggaattgcggtttctcagacgtcaggaacttcgagagctgagatttctccagaaagaggagcagagggcccagcagcagctcaatggcaaactgcagcagcagcgggagcagattttcaggcgctttgagcaggagatgatgagtaagaagcgacaatatgaccaggaaattgagaatcttgagaagcagcagaaacagacaattgaacgactagaacaagaacatacgaaccgcttgcgagatgaagctaaacgaatcaaaggagagcaagagaaggagctgtccaaannnnnnnnnnnnnnnnnnnnnnnnnnnnnnnnnnnnnnnnnnnnnnnnnnnnnnnnnnnnnnnnnnnnnnnnnnnnnnntgaaaaagatcatccaaaacagaaggcagagttggctaatattgagagagagtgtttgaataacaagcaacagcttatgagagctcgag

SEQ ID NO: 4147 - DNA, 1234 bp, Cricetulus griseus; identical to SEQ ID NO: 505

SEQ ID NO: 4148 - DNA, 596 bp, Cricetulus griseus
  misc_feature (405)..(461): n is a, c, g, or t
accactgccaccaccaccatcactgctgctgctgctgttaccaccaccactgaccccagctacattcctcaactatcaaattctccaagttctcaaaactcactgtaatgctttcagggccaccattgaccctatctgagccacccatctctccacaagaagcaaatcacctcctcccctcactccagcccctgcaaagggaagaagaacagcctatcagtctgtccctagactcctcaagacaggagttaggaacaatggggaggaaccttgagcctcagagggataaagaccaaaccacactccctagtgtctatgggcaagctcctcaaaattcaaatgaaatggtcaaggacacccatgtgagaagacctgcccatggccacaccagcttcagtgccactnnnnnnnnnnnnnnnnnnnnnnnnnnnnnnnnnnnnnnnnnnnnnnnnnnnnnnnnnctagagatgtcccctaaccaactccatactccatggtcatcatcccacccacaggcagccttctcaccaaaggaaggcagaagtagcagctatgatttccctaccccaaccttgcaattaaatcctccaacagtt

SEQ ID NO: 4149 - DNA, 600 bp, Cricetulus griseus
cattgattgtgctgctgtctatggcaacgagattgaaattggagaggccctgaaggaaaatgtgggaccaggcaaggcagtgcctcsagaggagctgtttgtgacatccaagctgtggaacactaagcaccaccctgaggatgtakaagctgccctccsgragacactggctgatctccarctggagtatctggacctctacttgatgcactggccttatgcctttgagaggggagacaatccatttcccaagaatgacgatggaaccatccgctatgactcaacccactacaakgagacctggaaggctctggaggcactggtggcaaargggctggtgaaagccttgggcttgtccaacttcaacagtcgacagattgatgatatcctcagtgtggcctctgtgcgcccagctgtcttgcaggtggaatgccatccatacctggctcaaaatgagctcattgctcattgtcaagcacgaggcttggaggtgactgcttatagccccttgggctcctcagatcgtgcgtggcgccatcctgatgagccagtcttgcttgaggaaccagtggtcttggcactagctgagaagcatggccg

SEQ ID NO: 4150 - DNA, 1400 bp, Cricetulus griseus
  misc_feature (570)..(596): n is a, c, g, or t
ctgaagctgaagaacgtgtttcttgcctacttcctggtgtcgatcgccggcctcctctacgctctggtgcagcttggccagccatgtgactgcctccctccgcttcgagctgcagctgagcagcttcgacagaaggacctgaggatttcccagttgcaagctgatctccgtcgaccaccccctgtcccagcccagccccctgagcccgaggctctgcccactatctatgtcattacccccacctatgccaggctggtacagaaggcagagctggttcggctgtcccagaccctgagcctggtgccccgtctacactggctgctggtggaggacgctgagagccctaccccgctggtctcggggctgctggctgcctctggtctcctcttcacacacctggctgtcctaacccccaaggctcagcggcttakggaaggcgagccargatgggttcggccccgaggagtakaacagcgcaacaaggccctggactggctccgakgcaaagggggtgctgttggcggkgagaaagacccaccaccaccagggacccaggragtggtgtatttnnnnnnnnnnnnnnnnnnnnnnnnnnnggagctctttaaggagatgcgttggactcgtggtgtctcagtgtggcctgtggggctggtgggcggcctgcgatttgagggtcctcgggtacaggatggccgggttgtgggtttccacacagcatgggaacccaacaggccctttcccctggacatggcgggatttgctgttgccctgcccttgctgttggctaagcccaatgcccagtttgatgcaactgcaccccggggccacttggagagtagtctcctgagccatcttgtggatcccaaggacctagagccacgggctgccaactgtactcaggtactagtgtggcacacacggacagagaaacctaagatgaagcaggaggagcagctgcagcggcagggccagggctcagacccagccattgaggtgtgatggcagcctcaccctgacttctaccttattttaggcacataccttgtgggactgggctccaggccagtccaggatgtggttttttaaaaagacctgacccctcagaaccagaggcagcccctccaaccacagggtgtggcccagctgcttccctcccttcccccagcctgccatgtggcactgcccacaggctggggacaagcagttgttgtattgagccaggtcagccccatctggggtggagcaggacagatggactcaggagggagggtggctgagggaactgggtaacttattggggacaagcatgcactggggggctagaggagctgggctggaccctccccacctgagcatgcggatcctcttcctacctctagaataaagaatctcaacct

SEQ ID NO: 4151 - DNA, 1400 bp, Cricetulus griseus
  misc_feature (1124)..(1138): n is a, c, g, or t
cccggggaactggacctggcccgaggggtctcagcagaatctgagttgccaggcttttgggaacccaccccccaagctaacctgcagccggaaaacagatggagccctgctgcccatcggggaagtgaagactgtcacatgggccatgaacggtacctacgtgtgccatgccgtgagctcccatggaaatatcaccagggaagtgttcctgaaagtgcttccaaaatctccgatatggcccatcatcatcattgtggtaatactggctactgtggtctttgtgggggtcctgaccatttacatttataaccgccagagaaagatcaggatatacaagctacagagggcccaggaagaggccatgaaactcaaggtcccgcctcactgagccacaagaacaccaacacctccctgggcgtcccctgcgggcagcagctagtgctgcttttgaacagaaaggtagacaaacagtgtttaccctcaccacctcaggctgtgacaagacaagatgtggcctggggatgcacccaatcagacctccttggcctcacacttgtggcctcaggactgtgaggagaggacctgacaagatcaagggtgtgtttctgtgaactggacacacccacagcctgtgggcctccagtcaggaaatgctgacctcattacctattgcccatgctggagcctctgcctaakgaggagygatatccaatakatacatagcaaagttggaacacaagagtatacttcctctgactcakgaacgctgggacattgyccccaactctycatgatgatgtatttattaaagttttacctggaggttggggatgtagctcagtggtagagcccttagcaaggccctggggttggtcctcagctccaaaaagagaaaaaaagttttacctgctatttattgagtaccttgatactagagcagcaagcaggttcttgtcaggatagtgttgcagggactggatatacaacagagcccggagagaggttcacatagggctaggggtgcctctgttggtcaggatgcttttcccaaaagagccatcacaagaatactaagtgatctaacagtggctccctgctcgtaggcctctcttggagtcctgacnnnnnnnnnnnnnnnagtaaccacttccccacctacatacattcctacctttgctccccgtgtcaaccaccatacccaaatatggatgcccacccttggcagctaaacaggggagtctcatgctcatgaaatcgtggtcaatccctgcctggttccacctcaaacaaagcctgcaagaagatgctgcaactacttaggagggtcctgcaagctggggggtggggggtacaacactcccagctcagaagactttcatttgagtcaataaagtgttatg

SEQ ID NO: 4152 - DNA, 600 bp, Cricetinae gen. sp.
ccgaccagtccgggggcgcaggcggcctgcgcacccatctcaagatcacagattctgcrggccatattctgtatgccaaggargatgcmactaaggggaartttgcyttcaccacggaagactatgacatgtttgaagtgtgttttgagagcaagggaacagggcggatacctgaccaactcgtgattctagacatgaagcatggagtagaggcgaaaaattatgaagagattgcaaaagttgagaaactcaaaccattggargtggagttacgacgcctagaggacctttcagartcaatcgttaatgaytttgcctacatgaagaagcgggaagaggagatgcgygacaccaatgagtccacraacaccagagtcttgtacttcagcatcttttccatgctctgcctcattggactagccacctggcaggtgttctacctgcgtcgcttcttcaaggccaagaagttgatagagtaatgaggctcagtcttctgtcccctggtatctcagccagcagaacatcgctgggacgtgcctggcctggctcaaggccatcctactaacagtaccatcaaggcacagtggagctttcttgcca

SEQ ID NO: 4153 - DNA, 600 bp, Cricetulus griseus
  misc_feature (572)..(572): n is a, c, g, or t
tcggtgttcatttataaaataacgtggaaagaaacaagcccttctggtttattatttactcatmatcgccttttgacagccgtgctgtaacacaagtakatgcctgaacttgaattaatatacaaatcagtaatgtattctctctttctctctttatattctggtctctacactacattattaatgggttttgygtactgtaaaaaaaaaattasctgyatcaaactagygcatgawtagattctctcckgatwattkatyacacacatagccccatakcccgtkgtatattattmttgtggwtwgwgacacaatywactcctacttgaaatacgctttaaaaatcgatgggggatgcttcgtgtgaacstgggcatttagctgcttctctgkctaagtgtkmttttcmcgatcactatgcattttaaacattgttgagtattccaaatgatttaggaaaatttttccatgattgcatttactgtacagattgctgcctctgctctgtttgtggcatagggtgcgaggatacacattgatttctttgtgcctgttttatgtgcacacattangcattgagaatttgaacttttttttttt

SEQ ID NO: 4154 - DNA, 1400 bp, Cricetulus sp.
tgtagaattctcttcatcggctgcattacagctcctacagtgagacagtactatgcttacctcaccgacacacagtgtaagcgcgttgggacacagtgctgggtgtttggggtcattggctttctggaagctattgtttgcataaaattcggacawgatcttttctctaagacccakatactctacgttgtattttggcttctttgtgtggccttcaccacgttcctgtgtctgtacsgcatgagttkggttgcasagcactatggtcaccgggaaaagacctattcagagtgtgragatggcactccagagatctcctggcatcatgggaaaggctcaaaaggttctgaagacagccctcccaagcattcaagcaacaacgaaagccattcttccagaagaaggaaccggcattccaagtccaaagtcaccaatggagttggaaagaaatgaaggagcctcattaatttcagatgttccagagagtgcctagacctgagagggcaacagaacacattgggaccttcctatgtggagatcaaaatgtacagaacacacagaaggaacagagggggctttggggatcatgattggagagtgtaagtcttgtctcccatagctctgaacatacattaggctgaccatgacttggggtcctttgccaacaggaggtgtctcctaacttcagcatgaggcctgtggtttctggtagctatacagtgtgctggaaggacaggatagctgtttgctcctggttgccagcaatggctctgtgcccatgtgtctcgtggacgctgtaggactatcttcattcagatgtcaacttcaccaactggttaatgaattgttcactgggttttatttttatgaatctgcctttccatttgactgattgttttaagttcagtttgtttttccatcttttcctttgtgttttcaagttagaatgcttaaaaacttccagaatccactgctgaaattggggttccttctagagaagaaatgggtggggggagtttttttgtgtccctgcttagcatactcagtccctagccacatgacagatgaccagcagcctgagtttgaaggaggctggctgtttgcactggagcctgagcttcagactggaacctgttgtattccattccaaacgctgtttgtcccaactgagtgcacacaagtgaccctgctagaggatctggggcactgcggctcctctcctgccaggtgcctttcccatatgcttggttttccttctgtggtatgttgcctactttgtctttctgtctcatgtgaggtgctagtgagtattaagtttcatctgtgccatgctctcctagaacattttcccaccctggatccttgttttaaataaatcaattcacatgaaaaactcctca

SEQ ID NO: 4155 - DNA, 1400 bp, Cricetinae gen. sp.
  misc_feature (693)..(747): n is a, c, g, or t
ggccgcgcgagatcctgagtckcccaacggcgcyrcggactcrggtggcwgygctgagtccgtmcgtcccagcgcggccctcatggcgctgctccgacgcccgacggtgtccagtgatttgaagamtattgacacaggagttaatcctaaagctaagagccatgtgacyatycggcgggcagttttagaagaaattggaaataaagttagaascmgagcagcyccagtggctaagaaacctcagaacaccaaaataccagttcagcccaccaaagtgacamatgtcaacaaacagccraaacctacagcctctgtgaaacckgtacaratggagacmctggctccmaaggatccttctcctgcccctgaggatgtctccatgaaggaagagaacctctgccaagctttctctgatgctttgctctgcaagatygaggatatagataacgaagactgggagaaccctcagctctgcagygactacgtgaaggacatctaccagtatctcaggcagcttgaggttttgcagtcyatcaacccacayttcttagatggaagagatataaatggacgtatgcgtgccatcctggtggactggctggtccaagtycattccaarkttaggcttytgcargaaactctttacatgtgcattgccatcatggaccggttcctacaggcgcagccggtctnnnnnnnnnnnnnnnnnnnnnnnnnnnnnnnnnnnnnnnnnnnnnnnnnnnnnnncgaggagatgttttctccaaatatcgaagactttgtttatatcacagacaatgcttacaccagttcccaaatccgagaaatggagactctgattttgaaagagctaaaatttgagttgggtcggcctttgccgctccacttcttaaggcgagcctcaaaggctggggaggtggacgtggaacaacacacgctagccaagtatctgatggagctaacgctcatcgactatgacatggtgcactatcacccttctcaggtcgcagcggctgcttcctgcctttctcagaaggtgctgggccagggcaaatggaatttaaagcagcagtattacaccggatacatggagactgaagtactggaagtcatgcagcacatggccaagaacgtggtgaaagtcaacgaaaacctcaccaagttcatcgctgtcaagaacaagtatgccagcagcagactcctgaagatcagcacgatcccacagctgaactccaaaaccatcaaagaccttgcctcccctctgatgggcaggctctaggtggctggctcccgccatgcacatctgattttgtacatactcctgtagtttacttcacaaaacctcttctcagactaatctcctaattgtgtattgaggaaaaaataaagctattgcggcc

SEQ ID NO: 4156 - DNA, 600 bp, Cricetulus griseus
ccgagaaaccagcaacccrsscacctctgcccctcttctmgctccsggcccattacaacttgggggtgactaacctgaaactyyaccaggcatctggttctttcttyavggccatgaaatgcatcatcskccmtacgttccccttaaataagacatctcgatggtacgggtctaatcagcccatgcccaacataactgtggkctcgtgcctttggtatcttttatttttcggtatgctgtgactcaccatagccgtcaaggsrkgaaskycaacttattcgtgtagctggacttctctattcaagtgtcatttatccacatatacaatccccaaagacatactattcaatgctttcttcggacatatctttaatttacactagattttcaagccaaacccccctcccccactgataattactaactctgacaaaccccaaaaccagagatttcaataccaggtctctccaccattctagtaatccgccaaacataacttgaatttcaataagtgtaaaatttaccctatcgctttaaaattcctattgacacctagactagttttaatatacaagtgggtgacgggcataaacacgttaa

SEQ ID NO: 4157 - DNA, 1400 bp, Cricetinae gen. sp.
  misc_feature (462)..(487): n is a, c, g, or t
  misc_feature (811)..(825): n is a, c, g, or t
gtgtgcagtacctgaatgaaatcaaggacagtgtggtggctggcttccagtgggccactaaggaggtgagtggctggggcctgggtgttccttctctggagaccaatgctttcttgactttcagtaggtgttggagtgtggctgggtctgactaaccagctttcctagggcgctctctgtgaggagaacatgcgtggtgtgcgcttcgatgtccatgatgtgaccctacatgctgatgccatccaccgaagaggtggtcagatcattcccacagctcgtcgttgtctgtatgccagtgtgttgactgcacagccccgcctcatggagcctatctacctggtggagattcaggtaagaaaaaaaaaacatgcctgcctgtgtggcgcccattcacccttctgtgatgatgcagttctcactggtgctctctgtccttcagtgtcctgaacaggtcgtgggtgnnnnnnnnnnnnnnnnnnnnnnnnnncgtggccatgtgtttgaagagtcccaggtggctggcacccccatgtttgtagtcaaggcctatcttccagtcaacgagtcctttggtgagtgtcatggcttccccttggtgttcccagccctctgcactctagggtggctgcctcattgggtcaaaagcaaagtggtctgtgtatccagatggtggtgggcagggagccaggaaatgtggaaacccttcctgagtgggaagaccaggcagggggaagcacaaaccgaggggctaggctcttgctgagcctcttgcctttatccaggttttacagctgacctgcgctccaacacnnnnnnnnnnnnnnncccccagtgtgtgttcgaccactggcagattctgcccggggacccgttcgacaacagcagccgtggcagccaagtggtggctgagacccgcaagcgcaaaggtctaaaggagggcatcccagcactggacaacttcctggacaaactgtaggcaggcttgcacagccacacactgcacagtgcccacccatcagaagacaccttgagactgtccccataatgctgctctggaggtggctggggccaccctgccattgagcactaacacttgatgccgattctatttatttcggaatttccgaggcagtggagtcgccctctgcaggctggactggctggcgggccatggggtgggcaggacacagctctttatcattttcagagggaaaaatgctcagatatcaaacatctaaataaatgcattcagaggtttatggggttcattcatggactggagttgcccaggggatgcagatttgtggctcctgggaggtgggtgatctatcggccctgtctggccctttgcagtaataaaactgctgtggttgaccttcctggactttgccaatctggca

SEQ ID NO: 4158 - DNA, 950 bp, Cricetulus griseus; identical to SEQ ID NO: 516
  misc_feature (95)..(115): n is a, c, g, or t

SEQ ID NO: 4159 - DNA, 1400 bp, Cricetulus griseus
  misc_feature (72)..(91): n is a, c, g, or t
ccactggtttcctcacctatggacactgtcacagaggctggaatggccattgcaatggcgcttacaggaggnnnnnnnnnnnnnnnnnnnnactgtacacctgaattccaggccaatgaagttcggaaagtaaagaaatatgaacagggattcataactgatcctgtagtccttagccccaaggatcgtgtgagggatgtttytgaagccaaagccaggcatggcttctgtggtatccccatcacagatacaggccggatggggagtcgactggtgggcatcatttcttcaagggatattgattttctcaaggaggaagagcatgaccgtttcttggaggagatcatgacaaagagggaagatttggtggtggcccctgcaggcatcactctgaaggaggcaaatgaaattctgcagcgcagtaaaaagggaaagttgcccattgtgaatgaaaatgatgagctggtagccatcattgctcggacagacctgaagaagaatcgtgattacccattggcttccaaagatgccaaaaagcagctactatgtggggcagccattggtactcatgaggatgacaagtataggctggacttactggctcttgctggtgtggatgtagtggttttggactcttcccagggaaactccattttccaaatcaatatgatcaaatacatgaaagagaaataccccaatctccaagtcattggaggcaatgtagtcactgctgctcaagccaagaacctcatagacgcaggtgtggatgctctgcgagttggcatggggtgtggttccatctgcattactcaggaagtgttggcctgtggtcggccccaagcaacagcagtgtacaaggtttctgagtatgctcggcgctttggtgttcctgttattgctgatggaggaatccaaaatgtgggtcatattgccaaagctttggctcttggagcttctacagtcatgatgggctccctcttggctgccaccaccgaagcccctggtgagtacttcttctcagatgggatccggctaaaaaagtaccgtggtatgggttctcttgatgccatggacaagcatctcagcagccagaaccgatatttcagtgaagctgacaaaatcaaagtggcccaaggagtttcaggagctgtgcaggacaaagggtctatccacaagttcgtcccttatttgattgctggcatccagcattcctgtcaggacattggtgccaagagtttaacccaagtcagagccatgatgtactctggggaactcaagtttgagaagagaacatcctcagctcaggtggaaggtggtgtccacagccttcattcgtatgagaagcggcttttctgaaaagagatccagtatatgccttgaatttttcaataaaagttttg

SEQ ID NO: 4160 - DNA, 1400 bp, Cricetinae gen. sp.
tcccttcacagagcagtagaaagcagttccaaccgtgctgactacctgttaccaagtcagtcaggaggtaggacctctacgttagacgccatgttgtcatttaacatgtattgctagccttaaggaagcagccgagagaagaactgaagtttcttactcatgtgattttaaatggagttcaaaggttgtcgttgagttctgactgcagggacgaacagtattgatgtggtgaggacgacagagtctgcagaatcagtgttcgtgattgtgtttgcgtacgtggtagcaactatgaaggatctataggaagcgttatgtctcctttggccttaagcaagacctgtgtgctgtaagtgccattctcagtatttcaaggctctaactgccttcattcagtgtgtggcctacaataactagcatttgttgatttgtttgatgtttcaaaattcccaaacaaaactcaaaaccactgactctgtcagagaagctgaagcactgggacatctcataccttggttcctcagtattcattttacgttgattgactttcggaaatctctacagaaacaaaagggaaattctctaaactacttaatccatgtactttcgtgtcagacatggataagccattagtatttggcttacaaccatttccaaatgttagttattacggacccagttgatgaacaacattagctgatttttacctatcagtattattttatttcttttagtttatagatctgtgcaacatttttgtactgtatgtcttcaagcctggcagtattaatacccttcttactgacacgtacttttagttttagaaaacttttatatttatgtgtcttatttttatatttctttatttattacacagtgtagtgtataatactgtagtttgtattaatacaataatatattttagtatgaaattttggaaagttgataagatttaaagtagagatgcaattggttctcgtgcattgagatttgatttaacagtgttctgttaacatttatactcgccttgggctgtagagcagagtttaaatgggaatgtattagttttacaactacaatcaagtcattctccctttacccagtttttaatatgaaactcttcactttgaaactcactgtgtgactcatagcatgatgctctgcagttcttctgttaagagttggcccagccataacccattcccttagcaagccaaattagaattgccttctgtaaacagtgttgggaacaatgtttaacatgttgtgccaatttgttcctgtatccatgtatgtaagctaccaatccgactcttccttttaagttccttgttacaccatggtcattttctagttttttaccagactccccagctcacaataaaatgcatcaacaagcc

SEQ ID NO: 4161 - DNA, 600 bp, Cricetulus griseus
tgcagctgaatgtcactgaggagaaggtgcctttcatttttaacatcaaccccagtacaactaacttcaccggcagctgtcatcctcaaactgctcaacttaggctgaacaacagccaaattaagtatcttgactttatctttgctgtgaaaagtgaaagccatttctatctgaaggaagttaacgtcagcatgtatatggctaatggctcagttttcagtgttgcaaataacaaccttagcttctgggatgcccctcttggaagttcttatatgtgcaacaaagagcaggttgtttcagtgtctagaacgtttcagataaacacctttaacctaaaggtgcaaccttttaatgtgacgaaaggaaagtatgccacagctcaagactgcagtgcagatgaagacaacttccttgtgcccatagcggtgggagcagctctggcaggagtacttgctctagtgttgctggcttattttattggcctcaagcgccatcatactggatatgagcagttttaggacctgcaatccaattgattatattataaaatacattcaaagaacgaggttttcttgcctgtcagtgctccttaaaacacac

SEQ ID NO: 4162 - DNA, 600 bp, Cricetulus griseus
ccagcagaaagaactggagaaggtctgcaaccccatcattaccaagctgtaccagagtgctggtggcatgcctggaggaatgcccgggggcttccctggtggtggagctcctccatctggtggtgcttcttcagggcctaccattgaagaggtggattaagtcagtccaagtagaggtgtagcattgttccacagggaaacatttgaaggacccaaatttgcaaagtttcatggcagtttttaaatttaaactgttaacaataaattactgggcattctcaatacttgaacatggaacatgtacacaggaaataaaacattgcactttataagcactgtatcctaagtggaaaacgcaatgtctaatatggtggaaaatggaatgtctaaataaaactatttaaattggcaccatacagttgtcctgactaactttggaattaagggtggcttttgtcaaggaacaaattaacaaatgcaggaatgagagatactaccctaacacaattctagtaccctccagtgggtttttcagcttagccttaggctaagaaccaacatgagttcaaagctgaaggtgctgggtaaattctctgaaaa

SEQ ID NO: 4163 - DNA, 600 bp, Cricetulus griseus
caccaagctgggccgtctggttaaggacatgaagatcaagtccctggaggagatctacctgttctccctgcccattaaggaatccgagattattgatttcttcctgggcgcatccctaaaggatgaggttctaaagatcatgccagtgcagaagcagactcgggctggccagcggaccaggttcaaggcttttgtcgctattggggactacaacggtcatgttggtcttggtgttaagtgctccaaggaggtagccactgccatccgaggggccatcatcctggccaagctttccattgtccctgtgcgaagaggctactgggggaacaagattggcaagccccacactgttccatgtaaagtgacaggccgctgtggctctgtgttggtgcgtctcatccctgcccccagaggcactggcatcgtctctgctcctgtgcctaagaagctactgatgatggctggtattgatgactgctacacgtcagccakgggctgcactgccaccctgggcaactttgccaaggccacctttgatgccatctccaagacctacagctacctaacccccgacctctggaaagagactgtgttcaccaa

SEQ ID NO: 4164 - DNA, 1400 bp, Cricetinae gen. sp.
cggaagtgataaagaccatgcaaaaaaaagctgcagatggagataagattactacagttattcagcatgtgttccagggccttattttgggaagtaaaaccaactgggcagaggattctggcctcagggaaattgtgctgcagctggagaaggatctcaccacaatctaataagaatcctgctctggcatgggagcctgtttgtgcccactctgcctttgaaatagcagagtttgtgggaatgcaagaagtggttcggaaccattctgatgcttcgattccagggcttgggttgatgataggacatgaaatctcttgtctgaaatacgatcactaaagtgactggcatactctgcgggagtctaaacactgtagccttggaaagaaggcatctggtccagctgcggtcgagtgtgcacatcttcacaacaacacaaccatttcctttcagtgtgctctcatgcatctgtgcattggtttgtcaaccaacacattggaaaagcatccaaagggtaagggtagtgattgtttaagtacagttgtgggttgtgactttttcttccgttctctgtttagcatgtattttacttttataagtttatgaataaaaagggatttcagattgaggagaccatagaccgagagacttcagggaacttggagcagttgctcctggctgtggtgaagtctattcggagcatacctgcctaccttgcagagaccctttactatgctatgaagggtgctgggaccgacgatcacaccctcatcagagtcgtggtgtcgaggagcgagattgatctgtttaacatcaggaaggagtttaggaagaacttcgctacctctctgtattctatgatcaagggtgacacatctggagactataagaaaaccctgctgctgctctgtggaggagaagatgactgagggattggctgtctggagtactctgcctgccgcctccagcagcttccttcagcaaatgcagccatgcttatatttctcatgcctgactggatgccttactcacactagtatgctaatgaccaaatgtgttgccttactgcactagtatgttaacaactaaatgtgtcatagatgacattagtggcacatccttctgatcttcctgttgacattagtgcttaccttcacttgtctctaagtctaatgtctgaattatcaatactgtctataaagaggtcagattgctttttataacattttttttaaagcttcatttatattaagttaataaccatattaccttgattggaaccttagccatgaaattgtgaactcctggaaatactgtcaatcaagcttactgctctatcagacctgtaaagttatgatagttgtatcaaaaatgatgaatgacaaataaacattcccttcccg

SEQ ID NO: 4165 - DNA, 1400 bp, Cricetulus griseus
  misc_feature (339)..(344): n is a, c, g, or t
caktgagacaggcgctggcaagcatgtgccccgggcygtgttcgtagacctggaacccacagtcatcgatgaagttcgcactggtacctaccgccagctcttccaccctgagcagctcatcacaggcaaggaagatgctgccaataactatgcccgtggccactacaccatcggcaaggagatcattgatcttgtcttggacagaattcgyaagctggctgaccagtgcacaggtcttcagggcttcttggttttccacagctttggtgggggaactggctctgggttcacctccctgctgatggagcggctctctgtcgattatggaaagaagtccannnnnnagttctccatctacccagccccccmggtttccactgctgtggttgagccctacaactccatcctyaccacccacaccaccctggagcactctgattgtgccttcatggkagacaacgaggccatctatgacatctgtcgtagaaacctcgacattgagcgccccacctacactaacctwaaymgsytsatwrgycarattgtgtcttccatcactgcttccctcagatttgatggagccctgaatgttgacctgacagaattccagaccaacctggtaccctaccctcgcatccatttccctctggccacatatgcccctgtcatctctgctgagaaagcctaccatgagcagctttctgtagcagagatcaccaatgcctgctttgagccagccaatcagatggtgaaatgtgaccctcgccatggtaaatacatggcttgctgcctgctgtaccgtggggatgtggttcccaaagatgtcaatgctgccattgccaccatcaagaccaagcgyascatccagtttgtggactggtgtcccactggcttcarggttggcattaattaccagcctcccactgtggtacctggtggagacctggctaaggtccagagagctgtgtgcatgctgagcaacaccacagccattgctgaggcctgggctcgcctagatcacaagtttgatctgatgtatgccaagcgtgcctttgtgcactggtacgtgggtgagggcatggaggagggggagttctctgaggcccgtgaggacatggctgccctagagaaggattatgaggaggtgggtgtggattctgttgaaggagaaggtgaggaagaaggagaggaatactaaattaattgtcacaaaggtgctgcttttacagggaagtttattctgttccaacaaagaaagctgtggtctgatcagttaatttgtatgtggcaatgtgtgctttcatacagttactgacttatggttgaaaatatgaatgacttgtcatagacccaagccgtccatttcactgatgggttttaaataaaatattccctgtctt

SEQ ID NO: 4166 - DNA, 600 bp, Cricetulus griseus
  misc_feature (346)..(371): n is a, c, g, or t
  misc_feature (535)..(555): n is a, c, g, or t
ctgtctgaggataccactgaagagaccttaaaagaatcatttgagggctctgttcgtgcaagaatagtcactgatcgggaaactggttcctctaaagggtttggttttgtagacttcaacagtgaggaagatgccaaagctgccaaggaggccatggaagatggagagattgatgggaataaagttactttggactgggccaaacctaagggtgaaggtggctttggtggccgaggtggaggcagaggaggttttgggggccgaggtggtggaagaggaggaggccgaggtggatttggcggcagaggccggggcggctttggaggtagaggaggcttccgaggtnnnnnnnnnnnnnnnnnnnnnnnnnnagacttcaagccacaaggaaagaagacgaagtttgaataattccttcccaatctttcccacttcgttttaaagaaaggactctggggttttacactgttacctgttaaatgacggagccttttaaggacatttcaagagattttttttcctacaaatattttgnnnnnnnnnnnnnnnnnnnnncgttgggggttgtaaaagaatgtttatcatgttttttttagctaa

SEQ ID NO: 4167 - DNA, 600 bp, Cricetulus griseus
gaccaaaatcgcctgacacctgaagaaattgaaaggatggttaatgatgcagagaagtttgctgaggaagacaaaaagctcaaagagcgcattgataccaggaacgagttggaaagctatgcttactctctcaagaaccagattggagataaagaaaagctgggcggtaaactttcctctgaagataaagaaaccatggagaaagctgtagaggaaaagattgaatggctggaaagccaccaggatgcagacattgaagactttaaagctaaaaagaaggaactagaggaaattgttcagcctattattagcaaactctatggaagtgcaggccctcccccaactggtgaagaggatacatcagaaaaagatgagttgtaggtgtactgatctgctagggctgtaatattgtaaatattggactcaggaactttcgttaggagaaaattgagagaacttaagtctcgaatgtaattggaatcttcacctcagagtggagttgaaaatgctatagcccaagtggctgtttactgcttttcattagcagttgctcacatgtcttggggttggggaaaggaggaattggcaatttttaaaatt

SEQ ID NO: 4168 - DNA, 1400 bp, Cricetulus griseus
ttgtacctgctcttgaaattgctaatgctcatcgtaagcccttggtcattattgctgaagatgttgatggagaagctctaagcacactggttttgaacaggctaaaagttggtcttcaggtggtagcagtcaaagctccaggttttggggacaataggaagaatcagcttaaagatatggctattgctactggtggtgcggtgtttggagaagaggggctaaatctaaatcttgaagatgttcaagctcatgacttgggaaaagttggagaggtcattgtcaccaaagatgacgccatgcttttgaaaggaaagggtgagaaagctcagattgagaaacgaattcaagaaatcactgagcagctagaaatcacaactagtgaatatgaaaaggaaaaactaaacgaaagactcgctaaactttcagatggagtagcagtgttgaaggttggaggaacaagtgatgttgaagtgaatgagaagaaagacagagttacagatgctctcaatgctacaagagcagctgttgaagaaggcattgttttaggagggggctgtgctctgcttcgatgcatcccagccttggattccttaaagccttctaatgaagatcagaaaataggtatagaaattattaaaagagcactcaaaattcctgcaatgacaattgctaagaatgcaggtgttgaaggatctttgatagttgagaaaattctgcagagttcctcggaaattggttatgatgctatgctcggagattttgtgaacatggtggaaaagggaatcattgatccaacaaaggttgtaagaactgctttactggatgctgctggggtggcctccttgctaactacagcagaagctgtagtgaccgaaattcctaaagaagagaaggaccctggaatgggcgcaatgggtggaatgggagggggtatgggaggtggcatgttctaattcctagaatagtgctttgcccttatcaatgaactgtgacaggaagctcaatgcaggttcctcggtgataacttaagagaagtcacctgaagaaaatgaagagaaggctggctgatcactataaccatcagttactggttcccattgacaatacataatggtttactgctgtcattgtccatgcctacagataatttattttgtatttttgaataaagacatttgtacattcctgatactgggtgcaagagccatataccagtgtcctgctttcaacttaaatcattgaggcagttctactattctgttacagtcaggattctagtgcttgcgtgaccagatgagttcagaagcagcctttctgtggagagtgagaataattgtgtacaaagtagagaagtatccaattatgtgacaacttttgtgtaataaaattttgtttaaaag

SEQ ID NO: 4169 - DNA, 1249 bp, Cricetinae gen. sp.; identical to SEQ ID NO: 527

SEQ ID NO: 4170 - DNA, 1400 bp, Cricetulus griseus
tgcctgtgaacgggcaaagcgcaccctctcctccagcacccaggccagtattgagattgattctctctatgagggaattgatttctatacctccattacccgtgctcgattcgaagaattgaatgctgacctgttccgaggcactctggaccctgtagagaaggcccttcgagatgctaaactagacaagtcacagatccatgacattgtcttggtgggtggttccaccagaatccccaagattcagaagcttctgcaagacttcttcaatggaaaagaactgaataagagcattaaccccgatgaagctgttgcttatggtgcagctgtccaggcggccattctatctggagacaagtctgagaatgttcaggatttgttgctcttggatgtcactcctctttcccttggcattgaaactgctggtggagtcatgactgtsctcatcaagcgcaataccaccatccctaccaagcagacgcagactttcactacctattctgacaatcagcctggtgtgctcattcaggtctatgaaggcgaaagggccatgaccaaggataacaacctgcttggaaagtttgaacttacaggcatccctccagcaccccgtggtgttcctcagattgaagttacttttgacattgatgccaatggcatcctcaatgtctctgctgtagataagagcacaggcaaggagaacaagatcactatcaccaacgacaagggccgcttgagcaaggaggatattgaacgcatggtccaggaagctgagaagtacawagctgaagatgagaagcagagagataaggtttcctccaagaattcactggagtcctatgctttcaacatgaaagcaacagttgaagacgagaaacttcaaggcaagatcaatgatgaggacaaacagaagattctagacaagtgtaatgaaatcatcagttggctggataagaatcagactgcagagaaggaagaatttgaacaccagcagaaagaactggagaaagtctgcaaccccatcattaccaagctgtaccagagtgctggtggcatgcctggaggaatgcccgggggcttccctggtggtggagctcctccatctggtggtgcttcttcagggcctaccattgaagaggtggattaagtcagtccaagtagaggtgtagcattgttccacagggaaacatttgaaggacccaaatttgcaaagtttcatggcagtttttaaatttaaactgttaacaataaattactgggcattctcaatacttgaacatggaacatgtacacaggaaataaaacattgctctttataagcactgtatcctaagtggaaaactcaatgtctaatatggtggaaaatggaatgtctaaataaaactatttaaattggcacc

SEQ ID NO: 4171 - DNA, 1400 bp, Cricetulus griseus
tgcagggttagctactgccatcctacagtctcaaaagcgcccccttaaggggccagataaaagaacttgctttakatgtggaacaattggacatattatggcagatggcccaactaggctgtgagcagaagctccccggcctatatgtcacctccatccaatatgaaaattttaccaaagcagctaatttgtctaaaagcctttctcagttcatgttacagaattggacctccaaatttgagcaaacgcttcgggagttgagagccgctattatccagattaactccacgcgccttgacctgtccttgacggagggattgtcatcatggatcgcttcrrctgtctcctattttaaggaatgggtgggggtgggattgtttggtgcakccgtttgctgcggattggtgttgcttctatggctggtctgtaggctcagggctcaaactaagagagacaaggtggttatcgcccaagcgcttgtagctttggaacaaggggcttccactgacatttggttaacaatacttaagcaataggccgctggccagacagctcttgcacacccggagcctargctcattgcacagggtagagtgtctggcttgagcagcccatgagggatgtggagcaaggcatcgcacagaagagttgcccagtatgcaggcttctctgggaggcatgttgtcctgcataagggttgcctgccctagtctccctttcccagaaaaacggcagaggacaggtcgagagcgcttcgggtcaagctaacagcctaatggcgactctcgtacacagtcttaatgtttgattgggaaggtacaacctctgcctctatccctcaacatatgggtgacctatttgcttgtaaaaatatgaagccttatcattaattaataaaaaagggggagatgtagggagccgtccctgcattctctattacaagatggcgcctgcatccggcaggcaccgaatggtawacaagktaatgcgcargtgctgggtaactttccatcccttggtctctgcctctyccgtggcgtcatatggtccgatgagctgcagccagtcagggggtgacacgtccgaggcggtggttgccagcctatataagggatgggtttttgggagttcggggtctctgctctgtaagcttatgctctccctctcaagatgcattaaagctttactacagaaggatcctgaatgtcctgcgtcattcttgctggcgagacggtagcgcgggacagatggtgacagccggtgcagaaagtgtcaacctcagcttccttctccaggaagacttcagcctgggactgctcctctacagagccccctaccaagattatctaacctgcctgccttcttgttgagctgtgtgtaataaactcattgagtttccc

SEQ ID NO: 4172 - DNA, 600 bp, Cricetulus griseus
atcatctctatagatattaaagattgcttcttttccatacctttgtgtgccaaggattcagggcgttttgcgtttacgctgccctcttgtaatcatgaacaacctgatttaaggtatgaatggatagtgttgccacaggggatggccaatagtcctactatgtgtcagttgtttgtagcagaagcaattgctcctttgagagtggactttccaaagattagatgtgttcattatatggatgatattttattggctgccaaagatgataaaacgcttaataaggcatatacaaaattggtaaaattgcttgagatgcataatttagtcatagcctcagaaaaggtacaaaaggacactgttgttaactatctaggggctaagattctccctcatacaattattccacaaaagatagagattagaaaagataatttaaaaactcttaatgattttcaaaagttgttgggagatataaattggataagatgttatttaaaattaccaaattatgagttgaagccattgtataatattctcaatggtgattcagcattagattcacctaggcagttaactgctgaagccagagaagctttaaag

SEQ ID NO: 4173 - DNA, 1400 bp, Cricetinae gen. sp.
agctggtcactcgggaagggaatgagctctaccactgtgtcatctacctggcccccggagactatcactgcttccactcccctactgactggactgtctcacatcggcgccacttcccaggttccttgatgtcagtgaaccctggcatggcccgatggatcaaagagctcttctgtcacaatgagcgtgtggtgctgagtggggactggaaacacgggttcttctcattgacggcagtgggcgccactaacgtgggctccatccgcatctactttgatcaagacctgcacacaaacagtcccagatacagcaagggttcctacaatgacttgagctttgtaacacatgccaacaaggagggcattcccatgcgcaagggcgagcacctgggtgaattcaacttgggctctactattgtgctcatctttgaggcccctaaggacttcaacttcaggctgaaggcagggcaaaagatccgctttggggaagcgctgggctctctctagtcgtcttggttgtggctgccaagggatctttccacgcagaagcatgagagtcttcagagacactcctgactgtcctggtgagaggactgtgggactggccaagtaggacctgaatgatttgttcccgcctgcccagaggtgcagagagaggttttggatttgtcaggacctagtgggtatgatttgaccctacatctcctggctgagcattgtgagaacagttatgcactaccacaccctctagttgctctccccagctgtctcagggcctttttctgtcagcccttctgttctttctgccttagcatctctgtctcccctcactgtgcacaggacgaggtgcttccttggcacagacctcttagaggaggccccatggccttcacaactgctttctgttcccagttcaaccctctgcttgctggaaaagtaaaatcatttatgttgttgaatgtgttgacctagattctgccagtgtcttctgaggtctgaccttccaaggctggctgagccctttttgctagggcaagaccaatcactgacttgcctggtagtgtccggagtggaggcccagccctgcaggaagtgtaggagacatgctgctattggtctaggggctgtgttggaggcagagggtgtggtggtcagtacttagaaaacctgttccaagtgactgcgggtattcaggccattaggatcccagtaatagggacaaggccagatttcatgttgatcttggggatgccatggatttctcctgcaggagaaattattgaactttgatttcaactgtatcagtagtacagtattttgtatgaaaagtaggagtcttctgaacagtaattcatttcattgcaagacattttgaaataaaaaagacaaaacaccattgta

SEQ ID NO: 4174 - DNA, 600 bp, Cricetulus sp.
  misc_feature (505)..(555): n is a, c, g, or t
agagctggacaggcactttctgggtcctttccaattccccatgttaggtcaaggtcccctctttatctgatacccttaagggacaacatactctgaagtaagtttctgtacagtgatacatttctgtgcatccttcctcttacctcttacactatcctgaaaatcctttgactatcataagacccttgtctgtcccgttccatactcccccactgatgctaatatacacttgatatcaaactgtcagcctaccaaaaagatattgtggcttatgggtattgctgtcttgttcttggtatgttcctatactgattgcccctcagtctgaaaaaaaatgctcattgtaagcctaaaactagatgattttgctttcccactcactgttttttctttccttctgcttgttgtaagaatccaatgaaataatgtatgtaaaagcaccttgtaaactgtaagctttcggtgtaagatgtaaggtgtgttgttttttcattaattctttgtnnnnnnnnnnnnnnnnnnnnnnnnnnnnnnnnnnnnnnnnnnnnnnnnnnngttttttaattcatcaataaccgcaaaattaaagtatctttaaag

SEQ ID NO: 4175 - DNA, 843 bp, Cricetulus griseus; identical to SEQ ID NO: 533

SEQ ID NO: 4176 - DNA, 600 bp, Cricetulus sp.
ctgctccaccattgggcttaaccagcccagcacaccaacccatgccgctagcatctgagcctttgggaagcagcaaagaggaaatcctctkcccagtggcatgccatgttgctttcamgcctctcccatgcttgtctctgttcagacgtgcatctcatctgtgacaaaggatgaagaacacagcatgtgccaaattgtacttgtgtgtgtcatttttaatatcactgtctttatcactatggttactcccctaagtgattggctttgtgcttggggctatatgtatgttgatcaaacacataccaggctgaactatagtgaaaccctggtgaccagggtggtcattcttattgatgtttgcactgctgttcatgttccgtgactcactggctggctgcctctattgtcaggattctcggacccttggtacttcactcttgctggtgacctctcagtctgaagagagggagcttggtgagacccttcacaggcagtgcatgggaagcatgctttgctgctactgaaatgagcatcagattgtgtacatcatgttatttttatgttttgcttttgatatagaactcagcaattcccatcaaa

SEQ ID NO: 4177 - DNA, 600 bp, Cricetinae gen. sp.
agatccggaaatctccttagctgactattggaaatgtacctcctgcaatgaaatgaatcctccccttccacctcwctgcaacagatgttggacyctkcgtgagaaytggcttccrgaagataargrgaargataraggggacrysyctgaagargccaarctggaggcagaaggcttagatgtgtcctgatggggaaaaaagctacakcgartgattstaaggagtcctgcactgaggarartgatgataargaaatatatacctcccagtcrcaagagagtgaggactattcccagccstcaacktccagcagcattgtttatagcagccargaagaygtcaaagagtgggagaaggaagagacascagacaaagargagartgtggaatctggcttctctcttaatgccattgaaccatgtgtgatttgccaagggcggcctaaaaatggttgcattgttcatggcaaaactggacatctcatgtcatgtttcccatgtgcaaagaagctaaaaaaaaggaataagccctgcccagtgtgcagacaaccaatwcaaatgattgtgctaacttattttagctagctgacctgcccataa

SEQ ID NO: 4178 - DNA, 1400 bp, Cricetulus griseus
gggcttggtctacctccttccacctttgtctctttctcccaggatcttccctctgtctctcagactgtctccccatctgtttttctcccttctccaagagttgtgaggatgaaggcaagactgactttctgagttgtcacctgccaaggcttttggatcatttcagcccagtaggaccatgggcaagtctccttaagactgctgtggtaaatgtccatggtctaagcccaagtgggctgagaagaaaagtggcctgagcaggaatggggtgatctcctcacttgaaagcaacatagggtgctgccaaagccccttccccagccctctggagacctgagtgtctcactttctgcctctttgttttttttgttatgttttgtttttatcaggctttctctgggaactaggtctctgtgcaccagagaacattttgcattctggacttatctggcatgcccccttttatacaaatgtttttatatgtgtgcttgggcctgtcacaatacagggcaaagttgctgtggcatctttatttctcctgggtctgcactccttccactgtgcctgactaagcctgttcattgttttctcatcatcacaagggacagccagggaaggaagggagcccagtcctggggaggtgggtgggaggcaagggcaggtcttgggatggatgaaataatgttggcattgttttttaattttttaaaaaataaatggtatcttacttaattgtcctgttccttcccactcctccaccccctgagagggcaacctgagctcagggtaggcccaaggggctggataggatgaagccacctttggacctaggatccaggggtcttcagcatgatttatttgttccttcctacccctagcctaactcctacctcccatagagtgtatttttatccttaattcctgcctgtgaataggccagggtgacagacactggtccaagccctccccagcagcaagcctctcttttttcagggtaggcagcaggaatcaggtctcctccttgagatgggggagtcctaggaagagagtggtcctgcttttctggactgcttggttcagggcttcctgggagacttgcgaggaaccttccttgtgcttctcatccctctaagctggttgaagcagagagtaggcaggggtggccccttcctgtgcttggtccccacctgtcctatcctgtctatcactgtaatttatggtcccgctgatggggcagcccagcccttgtgtctcgtgtatatactgtgccttttctctttgttgggggtgggagggtggtttttcactgaacaggggatatacctatgtcttccttgatgttgcaacattcaccatgtgctggacataggttactcaataaacacagattggtaccacct

SEQ ID NO: 4179 - DNA, 1124 bp, Cricetulus griseus; identical to SEQ ID NO: 537

SEQ ID NO: 4180 - DNA, 600 bp, Cricetulus griseus
  misc_feature (144)..(170): n is a, c, g, or t
ggcaccaagatgggcctcatcttcgaggtggcggagggcggtttcctggacatcgacgtggagatcacaggaccagataataaaggaatctataaaggagatcgagagtccagtgggaaatataccttcgcagcccacatggannnnnnnnnnnnnnnnnnnnnnnnnnntaggatgtccaccatgactccaaagatagtaatgttcaccattgacattggggaagctcccaaaggacaagacatggagacagaagctcatcagaacaagctagaagaaatgattaatgaactggcagtggcgatgacagctgtaaagcacgaacaggagtacatggaagttcgggagagaatacacagagccatcaatgacaacacaaacagcagagtggtcctttggtccttcttcgaagctcttgttctagttgccatgacattgggaymgaycyactmcstgaagagattttttgaagtccggagggttgtttaaaaggccttttcctgttgatcccaaattcacaattcasttgtttaccaaacaccttggycataataatgtcattmgttgatacatttttattttccgatcgttcatgactta

SEQ ID NO: 4181 - DNA, 600 bp, Cricetinae gen. sp.
ccttctggatccgcctcatgagtacccgttcgtgtggatgatgtccccaaggtccaagtcaccacatgagaaagtgagccagatcagaaacttcagagaaagggctttcccaaagtggtgagaatctccagaaagatccctgaactccatgtcctgagtctataagcatgctgacttttctgttgaagtttacaataaaaggaagccaacggtgatatttacattgtcaccagggattaaaggactgtggcacacaggtacttggagaacatccagcacaggccctgcagctacacgggaagctgcaggatggagtccagtcccatcagagaggctgtgctccaggctgcctcctcacttgtggaggcgctgagccgacgctggctatcctgatgtgttcagcgtttcacggaaacttcctttttgctcaaagaaaggaaggaactcacatgtataactgttacattcttgttttagactggatctattaactctaaccaaatgtagcatgtgatgatattttaaagtgtgttccatgtatcaattttataagagtttgtcacatttttctttcaaaacataaactcagatttaaaatta

SEQ ID NO: 4182 - DNA, 1198 bp, Cricetulus griseus; identical to SEQ ID NO: 540

SEQ ID NO: 4183 - DNA, 1181 bp, Cricetulus griseus; identical to SEQ ID NO: 541
  misc_feature (1096)..(1096): n is a, c, g, or t

SEQ ID NO: 4184 - DNA, 1400 bp, Cricetulus griseus
  misc_feature (89)..(114): n is a, c, g, or t
  misc_feature (183)..(233): n is a, c, g, or t
  misc_feature (680)..(724): n is a, c, g, or t
agaaaatggcctgaacggctttcagctctggataatctcctcaaccactccagcattttcctcaagggtgcccggctcatcccagagannnnnnnnnnnnnnnnnnnnnnnnnnatgacaacgttagagaaagtcatcaatgacacctgggcctggaagaatgcaactctggctgagcaggcnnnnnnnnnnnnnnnnnnnnnnnnnnnnnnnnnnnnnnnnnnnnnnnnnnncaagatgatggccctggaccgtgaggtacagtatctgctcaataaggccaagtttaccaagccccggccacgacccaaggacaagaatggcacccggacagaacctcccctcaatgctactgctggtgaccaagaggagaaggtcattccacctgcaggtcagcctgaagaggcaaagcccattttagaacctgacaaagaagagactactacggaaccaacagactctgagcctctggaattaggaggtcctggagcagaatctgaaccgaaagagcagacagcaggacagaagcggtcttcgaagaatgatgaactataacccccccctcctgtatccccactgtstsgcctscagccccttctcctaccacctctatttattatacatcagggttggggcaaggggtgggttttgcccttagggsstcaagttccttctctcannnnnnnnnnnnnnnnnnnnnnnnnnnnnnnnnnnnnnnnnnnnncatgagtgaaatgatctagttctgtccccagctccacgctctggtctcctactctctggccctgtgtttgggaaaaatcactattgtgtcttaattgtttgcctgtgggtaaatgagagaatggctgsccggttgttggagacctggtaatgggaaggatattttgggacactagagtgcccagtcttctctgagtatcatttcattctttgctgttccacaaaatcagtgtcctgtttgggccagtgtctacagagcctcatcaccacctttggcttcccagtgcctctttttctcttctgtgtcttctctttcccctgcccttcctccttggctcttctgtctgtctttgccttcccagtacagattgggcctcgtgcgaattcgccgacaccatcataaccaaagcaacatttaccaaaacatggaaataatgatagcagaaacagtcaatgagctaaatattttccttttccttttttttagatacggtctcgctctgttgcccaggctggcagtgaacttccgaggccttcggtccagatgatccatgtctacaagcttatgacactggaatttactttcaaatcaacaatcatgattgtgaaaaatcacgcattttatttttcaactcataataaaaatatgtattattagcagaatatatgtaagaaat

SEQ ID NO: 4185 - DNA, 1248 bp, Cricetulus griseus; identical to SEQ ID NO: 543
  misc_feature (1166)..(1180): n is a, c, g, or t

SEQ ID NO: 4186 - DNA, 566 bp, Cricetulus griseus
  misc_feature (415)..(455): n is a, c, g, or t
aagggacttcctgagcagaaaaggggcaaatttcagtctttttactgtgtttttgcagtattctatatataatttccttaatatataagtttagtgacaattagctaactcatttaatgggtggtaaattcagcagtagcaggttcatactgttctgtcactagcctgttattttttcagccgcatgaaaggggttgggtggggctgtataccaatcattattaaggtatatccggtttgtgctgaatggccatgttctaggtatgaaacccatcacatgcaataagactatctgtagatcctgttggccaagagtactgctataaagaatgacctatgtgtataggattggtccttcaactgaggccttgcatgacagctacctgtgccatggtttgtaggtgcaaagctaggnnnnnnnnnnnnnnnnnnnnnnnnnnnnnnnnnnnnnnnnnggggagagatgaagtctctcttggtcctaaggcatatctttctagctaccctcttggttggcctgtgtcaggaacctgtatccttgatgattgttcttttcatccattctg

SEQ ID NO: 4187 - DNA, 1400 bp, Cricetulus griseus
  misc_feature (1216)..(1254): n is a, c, g, or t
gaccttcaggccttcgtaggtccgaacgcgggaggcatagctggtctgaaaaagcatctggagtacttgagcaccctgaaggtgaagggcctggtgttgggcccaattcacaagaaccagaaggatgacgtcaatggaaccgacttgaaacagattgaccccagtttaggctcccaggaagattttaaagaccttctgcaatctgccaagaaaaagagcattcacatcattttggacctcactcccaactaccggggccagagtgcatggttcctccctgctcaagctgactgggtggccaccaagatgaaggaagctctgagttcttggttgcaggaaggtgtggatgggttccaatttcgggatgtggaaaagctgatggatgcatccttgtacttggctgagtggcagaatatcaccaagaacttcagtgaggataggctcttgattgcagggactgactcctccgacctgcagcaaattgtgaccatactcgaatccaccagcgacctgctgttgaccagctcctatctatcaaattccagttttactggggagcatacaaaattgctagtcactcggtatttgaatgccactggcagtcactggtgcagctggagtgtgtctcargcagggctcctgacagcctccgtcccagctcagctcctccgactctaccagctgatgctcttcactctgccagggacccctgttttcagctatggggatgagatcggcttgcaggaagctgtcgttcctggacagcctgtggaggccccattcatgccatgggatgaatccagcctcccccaaactccgggacacataagcacgaacatgacagtgaagggccagaatgaagaccctggctccctccttacccagttycggtggctgagtgaccttcggggtaaggagcggggtaaggaacgctctctgttgcacggtgacttccgtgcactgacctcctcacctggcatcttctcctacgtccgctactgggaccagaatgagcgttacctggtggtgctcaactttcaggacgtggtcctgtcagccaggctagaggccgccaacctccctgctggtataagtctgccagccagcgctaacctattgtttagcaccaacagtacccggctaggccaagagcagggtacttctctgagtctggaaaacttgtacctgaatcctcatgagggcttgctgttacatnnnnnnnnnnnnnnnnnnnnnnnnnnnnnnnnnnnnnnncaccctcctctcttttcccctggccttttgaattatttttttctctcctttggtttgtttgtttggtttaactttttgcagattgcatatcaattctcacactgggtgtttttggcttcaaataaaaatcacccctgcctgataaa

SEQ ID NO: 4188 - DNA, 600 bp, Cricetinae gen. sp.
  misc_feature (499)..(499): n is a, c, g, or t
  misc_feature (506)..(506): n is a, c, g, or t
  misc_feature (552)..(552): n is a, c, g, or t
ggatggtctggcmacatggagaggattatgaaggcacaagcataccaaacgggcaaggacatctctacaaattactatgcaagtcagaagaaaacatttgaaattaatcccagacatccgctgatcagasacatgcttaggarggttaaggaagatgaagatgacaagactgtcttggatcttgctgtagttttgttwgaaacagcaacacttcggtcaggatatcttctaccagacaccawggcatatgsagatagaatakagagaatgcttcgcctcagcttaaacattgaccctgaagcacaggtagaagaagaaccggaagaagagcctgaagacaccacagaagacacagaacaagacgaggaggaagaagtggatgcaggcacagaagaagaagaagaagaggaacaggaaacagcaaaggaatctacagcagaaaaagatgagttataaattatcctctcaccacagatcctgtgtggagagggaatgtganattttanagtcgtttcttttcagagagacttgtttgggatgctccccagcctncttctcccctggactggtaaatgttggggattgggggttaccaggaag

SEQ ID NO: 4189 - DNA, 723 bp, Cricetulus sp.; identical to SEQ ID NO: 547
  misc_feature (615)..(630): n is a, c, g, or t

SEQ ID NO: 4190 - DNA, 1178 bp, Cricetulus griseus
gtgaacggatttggccgtattggacgcctggttaccagggctgccttcacttctggcaaagtggamrttgttgccatcaatgaccscttcattgacctcaactacatggtctacatgttccagtatgactctacccatggcaagttcaaaggcacagtcaaggctgagaayggraagcttgtcatcaacgggaaggccatcaccatcttccakgagcgagatcccrccaacatcaaatggggtgatgctggygccsagtatgttgtggartctactggcgtcttcaccascrtssrgaargctggggcccacttgaagggyggrgccaagagggtcatcatctycgcmccttytgctgatgcccccatgtttgtgatgggtgtgaaccawgacaagtatgayaactccctcaagattgtsagcaatgcrtsctgcaccaccamctgyttakyccccctggccaakgtcatccatgacaactttggcattgbgraargactcatgaccacrgtccatgccatcackgscacccakaaractgtsgwtggcccctccsgraakctgtggcgtgatggccgtggggctgcccavaacatcatccctgcatccactggygctgccaargctgtgggcaargtcatcccadagctkaacgggaagctsactggcatggccttycgtgttcctacccccaacgwgtccgtygtggatctsacatgtcgcctggagaaasctgccaagtrtgargacatcaasaaggtggtgaagcakgcatcygadggcccwyygwwrggyatcctgkgctacaccgakgaccasgttgtctcctgcgacttcaasagtgactcccactcttccacctttgatgctggggctggcattgctctcaatgacaacttygtaaagctcatytcctggkatgacaatgaattyggctwcagcaacagrgtggtggacctcatggcctacatggcctccaaggagtaagaagcccaccctggaccatccaccccascmaggactcsagcaagarggaggccctggctgctgagcagtccctgtccaataacccccacaccgatcatctccctcacagtttccatcccagacccccagaataaggaggggcttagggagccctactctcttgaataccatcaataaagttcactgcaccc

SEQ ID NO: 4191 - DNA, 600 bp, Cricetulus sp.
cccaatctgccctacttaattgatgggtcccacaagatcacccagagcaacgccatcctgcgctacattgcccgcaagcacaacctgtgtggagagacagaggaggagaggattcgtgtggacattgtggagaaccaggctatggacacccgcatgcagctcatcatgctctgttacaaccctgactttgagaagcagaagccagagttcttgaagaccatccctgagaagatgaagatgtactctgagttcctgggcaagcggccatggtttgcaggggacaaggtcaccttatgtggatttctcgcttatgatgtccttgatcagtatcaaatgtttgagcccaagtgcctggatcccttcccaaacctgaaggacttcttggcccgctttgagggcctgaagaagatctctgcctacatgaagaccagccgcttcctccggagacctatattttcaaagatggcacagtggagtaacaagtaggcccctgctacacgggctctcatatggaggacctgtgcacactggatcctcctggccctggggacagctggtcttctgcactgctgcctcaaggttctcacttctttctccttt

SEQ ID NO: 4192 - DNA, 515 bp, Cricetulus sp.
  misc_feature (54)..(76): n is a, c, g, or t
  misc_feature (129)..(163): n is a, c, g, or t
  misc_feature (192)..(227): n is a, c, g, or t
  misc_feature (333)..(365): n is a, c, g, or t
tgcmkawyttcgtgaagaccctgacyggcaagaccatcaccctagaggtggaannnnnnnnnnnnnnnnnnnnnnngaaggccaagatccaggataargagggcmtcccccccgaccagcagcgactcnnnnnnnnnnnnnnnnnnnnnnnnnnnnnnnnnnntctttctgattacaacatccagaaagagnnnnnnnnnnnnnnnnnnnnnnnnnnnnnnnnnnnnctattaattcttcagtctgcattcccagtgggcaatggatggcattaatctgcactatagccatttgccccaatttaagtttagaaaatccaagtttcagtaatannnnnnnnnnnnnnnnnnnnnnnnnnnnnnnnnttgttgcatggtaagcatacatggtgtcatttgtgaagtttctatggtggcttgggtgggggacttcccctactgtctttagagattggtatttaactaaaatttgcgtcacttatgtcttagctgagttgggaacttcgtttaaaagtt

SEQ ID NO: 4193 - DNA, 1400 bp, Cricetulus griseus
ccgaatctctgtgtactacaatgaasscacaggtggcaagtatgtccctcgggccatattggtggatctagaacccgggaccatggactccgttcgatcaggtcctttyggccagatcttcagaccagacaactttgttttcggtcagtctggggcaggcaacaactgggctaagggtcactacacsgagggagctgagctggttgactcygtcctggaygtggtkcggaaggaggcrgaragctgtgactgcctgcagggcttycagctgacccactcvctgggyggaggyaccggttcyrgtatgggcaccctggctcatcagcaagatccgmgaagaataycccgaccgratcatgamyaccttcagygtsgtaccytcwcccaaagtgtcygacaccgtggtggagccctacaaygccaccctgtcygtscatcagctggtggagaacaccgacragacctactgcatcgacaacgaggccctstacgacatcctgcttccgcackctmaagctcaccacgccsacctayggrgacctsaacmacctsgtctcggccaccatgagcggggtcaccacctgcctccgcttcccrggccagctcaaygcygacctccgraagytggcsgtcaacatggtscccttcccmcgtctccacttcttcatgccyggcttygcccctctcaccagccgygggagccagcagtaycgggccctcacygtgccygarctcacccagcaggtcttcgatgccaagaayatgatggcmgcctgtgacccccgccacggccgmtacctcaccgtggckgccgtcttccgygggcgsatgtccatgaaggaggtggacgagcagatgctsaacgtgcagaacaagaacagcagctacttygtmgagtggatccccaacaacgtcaagacsgcygtctgcgacatcccrccrcgsggcctcaagatggcmgtcaccttcatyggmaacagcacggccatccaggagctcttcaagcgyatctcsgagcagttcacsgccatgttccgccggaaggccttcctscactggtacacsggcgagggcatggacgagatggagttcactgaagccgagagcaacatgaacgacctcgtctccgagtaccagcagtaccaggaygccacygcggaagaggaagaggatttcggggaggaggcagaagaagaggcctaagscagasagagagagccctgcgtcttctcctcaggctrcttaagttccctcagctytcttcagctgcccgtttttctccttcagagttttctyttctgctgcctctgtcctgtttttttatttttttccatcggagggggggtaaacagtgcctggcacatagtaggcgctcaataaatatttgtttgtggaatgtc

SEQ ID NO: 4194 - DNA, 600 bp, Cricetulus griseus
catgatggctgcctgtgatccccgccatgggcgctacttgacagtggctgccgtgttccggggccgcatgtctatgaaggaggtggacgaacagatgcttaatgtccaaaacaagaacagcagctactttgttgagtggattcccaacaatgtgaaaacagctgtctgtgacattccaccycggggcctaaaaatgtctgccaccttcatcggcaacagcacggcaattcaggagctgttcaaacgcatctcagagcagttcacagccatgttccgacgcaaggccttcctgcactggtacacgggtgagggcatggatgagatggagttcaccgaggctgagagcaacatgaacgacctggtgtccgagtatcagcagtaccaagacgccacggctgaggaggagggagagtttgaggaggaggcagaagaggaggtggcctagagctgttttaagcagtctaaagcatgggagcagtgtgaactctttattcattcacagcctgtctgctagccatgtccactgtgcatttgctgtcctgtcctgacatcacttgtacagataccaccattaaagcaattcatagcaaaaaaaaaaaa

SEQ ID NO: 4195 - DNA, 1400 bp, Cricetulus griseus
  misc_feature (1108)..(1136): n is a, c, g, or t
tgctggatgtgattcgcaaggagtgtgaacactgcgactgcctgcagggcttccagctcacccactcgttgggcggckgcacaggatcakgcatgggcaccctgctcatcagcaagatccgggaggagtacccggaccgcatcatgaacaccttcagcgtcrtgccgtcgcccawrgtctyakacaccgtggyggaaccttacaatgccacattgtcggtacaccagctggtagagaacactgacgagacctactgcatcgacaacgaggccctctacgacatctgcttccgcactctcaagctgaccacacccacgtacggggacctcaaccatctggtgtctgccaccatgagcggtgtcaccacatccctgcgttttcccggccagctcaacgctgacctgcgcaagttggctgtgaacatggtgcccttcccacgcctgcacttcttcatgcccggcttcgccccactcacagcccggggcagtcagcagtaccgtgccctgacagtgcccgagctcacacagcagatgttcgatgccaagaacatgatggctgcctgcgacccacgccacggccgctacctgaccgttgccaccgtctttaggggccccatgtccatgaaggaggtggacgagcagatgctggccatccagaacaagaatagcagctactttgtggagtggatccccaacaacgttaaagtggccgtgtgtgacatcccaccccggggcctgaagatggcttccaccttcattggcaatagcactgccatccaggagctattcaagcgcatctccgagcagttctcggccatgtttcgccgcaacgcttttctgcactggttcaccggcgagggcatggacgagatggagttcaccgaggctgagagtaacatgaacgacttggtgtctgagtaccagcagtatcaggacgccacggtcaacgacggggaagaagcttttgaagatgaggatgaagaagagatcaatgaatagggggcctttaagatgctatggtgcacacctgctcttagccctgatggtgtgagcacggtgccctggtctacacatcacaggcccctctcaaccaaatacacaccactgtnnnnnnnnnnnnnnnnnnnnnnnnnnnnnctttcctttaccagacaattgacagtcctaccagaccagggtgatttcatacaggaacactgaaagcaaagttagggggctgtaaaaggctgaagacagagaccaccttccgttaagtgcccagccatcagagttagcagggaagttagaataaagatttgtgtttcatccttggtgataaaatctaaagcaccgcattgttgccttaattgaatatacaatatggaactttgtgacaatccattcataataaaatgctaaacc

SEQ ID NO: 4196 - DNA, 1400 bp, Cricetinae gen. sp.
  misc_feature (1047)..(1065): n is a, c, g, or t
gtcgagggccctggatctgttctcggataatgcccctcctccagagctgcttgagataatcaacgaagacgtggccaagaagatgtgtgaggagcaccagctctgtgtcgtggccgtgctgccccacatcctggacactggggccgcaggcaggaactcttacttggaaattcttctgaagctggctgacaaatacaagaagaagatgtgggggtggctgtggacagaagctggagctcaktctgagctggagaatgcactggggattggagggtttgggtaccctgccatggcasscatcaacgctcgcaaaatgaaatttgctcttctcaaagggtctttcagtgaacaaggcattaatgagtttctcagggaactgtcttttggacgtgcctccacagcacccgtgggaggtggttcctttcctgccatcactgccagggagccctgggatggtagagatggtgagcttcctgtggaggatgacattgacctcagcgatgtggaacttgatgacctggagaaggacgagttgtgaggccacagctcagccttccaatgtcttctcttgggagcgggcagttttccggcagtgaaggctctggtcagctgtctgcccttggcctttccgagcagcacttgctggctggccggccactaaaaacactgcagcagtgaacctcggcgtctcaagaaaacactgaagaattctatgaattgtagcagtgaattggattgcgttctttggtatattttgaagcaaggtgggttgttgaaacattttccctcctgactgctgcttgaatgttcttggaagctgtttcttatatatagggtttttaaaatgtgattcctttgtttgaatattaatggctttttccattaaagaataaaatgatattttggacaatgctgataaatgtatgaaattagtggcacatcataaaatcggagtctggtggttagcctgaaaactaaccctgtgcactgatgacaccacaccacggcttcctgtaaaagtgtttttaaatatgaagataagaccannnnnnnnnnnnnnnnnnnccattaaaggctagactcacaaccaaaaatgaagacagaccttttgacaagggtgtggttctgtgtggtaaacttggtaccgagggagaccacactcatgccccaaacaaagtcttggtcttcgggcttcaccagtgacaaggaggctcaggttttcaacattctcactgatttcccattaaacgtctcatgaagaccagagccccagtggattatccaagctattttcactttgtgtaaaacgctcaggagacagtttggagttatgttaggacaccagaaaagcctcagactgaggcattttattgtaacttaaaaaaataaatacactctaa

SEQ ID NO: 4197 - DNA, 600 bp, Cricetinae gen. sp.
  misc_feature (194)..(217): n is a, c, g, or t
caagaagaagcaggactcggagaccgagcggctcaaggggacttcggagaacgaggaggaggacgacgactacaacaagcccctggacccgaactctgacgacgagaaaatcacgcagctgctgaaaaagcacaagtcgagcagcggcggcctcctgctgcacgcgtccgaggccgagggctcgtcctgagcgnnnnnnnnnnnnnnnnnnnnnnnntgctgcgggatcccgggccgccccgaccgcgcccctcagccggtcacccccgggcccagcaccgcggctgctccccgggcctttactattttctaagatgtacatatctatttttttaacccagaaatcgtggcggggcctggggggataggacggcgcgttgacgagaaggaagggagcccgccgagtgcgccgcgttaaatgacgaacccgcatccccgcggctcccctggacccttcccacccgcggtgtcagtcaatccccacccccatccaggctcggtcccttgctctgtggtccctgagctccggggttcgtgtttgtgaagagtcgacagccagcgcctggtgggaatctccgagccacacagggcatctgccac

SEQ ID NO: 4198 - DNA, 962 bp, Cricetinae gen. sp.; identical to SEQ ID NO: 556
  misc_feature (95)..(109): n is a, c, g, or t

SEQ ID NO: 4199 - DNA, 1400 bp, Cricetulus sp.
  misc_feature (411)..(468): n is a, c, g, or t
ttcaagggaaccctgggaaaaccaagaagggtgagctgagcatcatcccctatgaaatcacgctcctgtctccctgcttgcatatgttgcctcatcttcactttggcctcaaagacaaggagacaaggtatcgtcagaggtacttggacttgatattgaatgactttgkgwsgcaraaawttattgtscgagctaagatcatcacatatataaraagtttcttggatgagctgggatttctagagattgaaactcccatgatgaacatcattccaggaggagctgtggccaagcctttcatcacctatsacaatgagttggacatgaacttatatatgagaatkgctccagaactctaccataagatgctggggggggggggcattgaccgagtttatgaaattggacgcnnnnnnnnnnnnnnnnnnnnnnnnnnnnnnnnnnnnnnnnnnnnnnnnnnnnnnnnnntctacatggcttatgcagactatcacgacctcatggagatcacagagaagatgctgtcaggaatggtgaaaagcattacaggtagktacaagatcacctaccacccagatgggccmgaaggtgaagcctatgagattgatttcaccccacctttccgaagaatcagcatggtagaagagcttgagaaagcactgggtgtgaagctgccagagaccagcctctttgaaactgaagaaactcgaaaaattcttgatgatatttgtgttgcaaaagctgttgaatgccccccacctcggaccacagccaggctccttgataagcttgttggtgagttcctcgaagtgacatgcatcaatcctacattcatctgcgatcacccacagattatgagccctctggccaaatggcaccgctccaaagagggtctaactgaacgctttgagctgtttgtcatgaagaaggaaatctgcaatgcctacactgagctgaatgatcccatgcggcagcgacagctgtttgaagaacaggccaaggccaaggctgctggtgatgatgaagccatgttcatagatgagaacttctgtactgccctggaatatggactgcccccaacagctggctggggcatgggtatcgaccgagtcaccatgtttctcacagattccaacaatatcaaggaagtacttctgtttcctgccatgaagcctgaagacaagaaggaaactgcagcagccactgaaacactagaaagcacaacagccggcccctctgtctagaagataaatgaaactctggcttctctgcatttcagcagacctggtctaagtgttgccatccctctggccactgcaattcaaccaccagaagagagaagaattaaaggatttctttttattccttattaccaaataaaccatttctctctttaccta

SEQ ID NO: 4200 - DNA, 1049 bp, Cricetulus griseus; identical to SEQ ID NO: 558

SEQ ID NO: 4201 - DNA, 1400 bp, Cricetulus sp.
  misc_feature (481)..(510): n is a, c, g, or t
  misc_feature (1292)..(1346): n is a, c, g, or t
tgctgcagaactcaaatctctgctgggcaaggatgttctgttcttgaaggactgtgtgggcccagaagtagagaatgcctgtgccaacccagcagctggcactgtcatcctgctggagaacctccgctttcatgtagaggargaagggaagggaaaagatgcttctggcaacaagattaaagctgagccagccaaaatcgatgctttcagagcctcactatccaaacttggggatgtctatgtcaatgatgcttttggaactgcacaccgagcccacagctccatggtgggtgtgaatctgccacagaaggctggtggatttttgatgaagaargagctgaactactttgccaaagctttggagagtcctgaacgccccttcctggctatcttgggaggagctaaagttgcagacaagatccagctgatcaataatatgctggacaaagtcaatgagatgatcattggtggtggaatggcnnnnnnnnnnnnnnnnnnnnnnnnnnnnnnggagattggaacttctctgtatgatgaagaaggggccaagattgtcaaagatctcatggccaaagccgagaaaaatggtgtgaagattaccttgcctgttgactttgtcactgctgacaaatttgatgagaatgccaagactggccaagctactgtggcctctggtatacctgctggctggatgggcttggactgtggtactgagagcagcaagaaatatgctgaggctgtggctcgagctaagcagattgtttggaatggacctgttggggtttttgaatgggaagcttttgcaaggggaaccaagtccctcatggatgaggtggtaaaagccacttctaggggttgcatcactatcataggtggtggagacactgccacttgctgtgccaaatggaatacagaggataaagtcagccatgtcagcactgggggtggtgccagtctagagctcctggaaggtaaagtccttcctggggtggatgctctcagcaatgtttagtattttcctgccttttggttcctgtgcacagccagcctctaagtcaacttagtgtgtttccacatctccatttggtgtcagctagtggcggagatgcagcaccaggaacccttaaacagttgcacagcatcttaggctcgtctttactgcatcgggatttgtctacattcttcaagatcccattttaatcccttagtggctaagtgcattctagagtgcatctatttatattctgcctgaaaagaaagtgagctataaaagcttagttctctttgagtannnnnnnnnnnnnnnnnnnnnnnnnnnnnnnnnnnnnnnnnnnnnnnnnnnnnnncagctgtaggtttggagaagttgatgctctattaataaagatgtccactgacaa

SEQ ID NO: 4202 - DNA, 278 bp, Mesocricetus auratus
cttcagcggggccagcagcaacagcgagcaggtcggagcgcagccctggagttcacttgcggttcaaaggagactcagtgactcccgtggagcgctctgctttgggcctgggaggagaaaggcggggtggagggtggagggtgggggtgggaagaagggaggtgaaggagtaggggaggaagtccccaggagcagcctgcgcccaaacatttgtcaaacaagcacacacacccacttgggaaatcaagttggtgcgagggggctggtggccactgcag

SEQ ID NO: 4203 - DNA, 600 bp, Mesocricetus auratus
gggtctccatctcctcaaatgtacagggaggtaaaggcagattcctagttaggtactaaggaatcggaggactcctgggggtgtctccctatgtagggttggaggactagtgtagatgctccttattaggtggtttattgtgagtggccacatatgccttctctagagctcagggctccatgactaagaaagaagcacttgacgattcttctacctggccatgaccatgtggagttgcctccaacctccaacactgggtctctttctaccccaattctctggcgccctccttcctagatatgctctgggcctatccttgacttgggtcccctcatcccctgcagaatgactccctgatgaggcagatgagagagctggaggatcgctttgccagcgaggccagtggctatcaggataacattgcacgcctggaggaggagatccggcacctgaaggatgagatggcccgccacctgcgggagtaccaagacctgctcaatgtgaagatggccttggatgtggagattgccacctaccgcaagctgctggagggcgaggagagccggtgaggatttaggtatcgggtagggtgctgggatc

SEQ ID NO: 4204 - DNA, 600 bp, Cricetulus sp.
  misc_feature (519)..(536): n is a, c, g, or t
tgaggacttgtttcacatgcagaattctctctgcccacagtttgtcaaagcttgagttacagatatctgagatttgtctgcaccctgcatgtacacagccctaggtctgcctctttactccatgtgggcatatcagtggtgtgtgttgtgtggagccattcatcacacagtgagtgtgctatggcttgcttcacactcagctaaaggctccctgacagtccagcagatggttatggcgcaggtgtttggatggaccttgtttgaatggtcaggtgagagggcaatgtacagaagggataggataagacacagactggatatatagctcagtgtagagtagttgcctagtgcttccatccctagcacctcccaaaaagaaaaataaatgtaattgatcttatctgggagggaaatttagcattacatttttatttatttattagagacagggtctcagtagtgtgccctgtcctggaactcatgatgtaaacaaggctggcctcaaactcacagagacannnnnnnnnnnnnnnnnnttggctataaaggtgtgtagccaccatgctcccccttcagcattaacctttgaggaaccaccag

SEQ ID NO: 4205 - DNA, 1400 bp, Cricetinae gen. sp.
  misc_feature (428)..(447): n is a, c, g, or t
  misc_feature (754)..(772): n is a, c, g, or t
gagaagcagctgcagaaggacaagcaggtctaccgggccacgcaccgcctgctgctgctgggtgctggagagtctggcaaaagcaccattgtgaagcagatgmggattctgcatgtwaatggktttaacggagagggcggcgaagaggacccgcaggcygcaaggagcaacagcgatggygagaaggccaccaargtgcaggacatcaaaaacaacctgaaggaggccattgaaaccatcgtggccgccatgagcaacctggtgccccctgtggagctggccaaccctgagaatcagttccgygtggactacattctgagcgtgatgaacgtgcccaacttygacttcccacctgaattctacgagcacgccaaggctctgtgggaggacgarggrgtgcgygcctgctaygarcgctccaatgagtnnnnnnnnnnnnnnnnnnnncagtacttcctggacaagattgacgtgatcaagcaggcygactaygtgccaagcgaccaggacctgcttcgctgccgcgtcctgacctctggratcttygagaccaagttccaggtggacaaagtcaacttccacatgttcgatgtgggcggccagcgcgatgarcgccgcaagtggatycartgcttcaatgaygtgactgccatcatcttcgtggtggccagcagcagctacaacatggtcattcgggaggacaaccagaccaaccgyctgcaggaggcyctgaacctcttcaagagcatctggnnnnnnnnnnnnnnnnnnnccatctctgtgatcctgttcctcaacaagcaggacctgcttgctgaraaagtcctcgctgggaaatcgaagattgaggactactttccagagttcgctcgctacacmactcctgargatgcgactcccgagcccggagaggacccacgcgtgacccgggccaagtacttcattcgagatgagtttctgagaatcagcactgcyagcggagacgggcgccactactgctaccctcacttyacctgtgccgtggacactgagaacatccgccgcgtcttcaacgactgccgtgacatcatccakcgcatgcacctccgccaatacgagctgctctaagaagggaacacccaaatttaattcagccttaagcacaatyaattaagagtgaaacgyrattgaaaagcrgttgatcacccaccatagggcatgatcaacaatgcaacctttccttcttctccccagtgattctgaaaaccccctcttccccttcagcttgctttgatgtttccaaatttagtaagcttaaggcggcctacaaaagaaaaaaaaagaataagaaataggccacaaaagttccctctcactttcagtaagtaaaataaaagcagcaacaaacagaaataaatgaa

SEQ ID NO: 4206 - DNA, 600 bp, Cricetinae gen. sp.
  misc_feature (41)..(61): n is a, c, g, or t
gttgctgcattcttaaactttttatttgcactatgagcctnnnnnnnnnnnnnnnnnnnnntgtgagcaaagtaaatctcttaaattaccactattaaaaatgctgagattgtatctgtaagaaacatttaaagaggagatatattagttttttaattggtattttaatttttatatattcgggaaagaaagctgtgattgaatattgttaattataccaccatgtgtttagaacagtgtgaagcactcagtttcatgtcagtaaccatctaagaagttttgctcagtggaataaacatatgttttatcagtgttgcctatattttcccacttggattctttcagtgagtcattgtcaacagttcctttaaatgcaaataaattctaaaaatttaccacttttttgagttttttaatgtaaaatttcttaaacttaaggactgtctcttatagaactctgcatgccaatcatttccctataaattaacttggtaaccctcaccaaatatcgcaagtaatggttatctggtagaatggtttggcagaactaggaaggctcctgtctacttgagacagtactatttactacatttctctgtt

SEQ ID NO: 4207 - DNA, 600 bp, Cricetulus griseus
  misc_feature (243)..(322): n is a, c, g, or t
tgtgaataaaaaaccaatgtgattctaactytggttttctttgtgtgacttggaaataaggaagtggggtgacagattgacttaatgagattgcaaggatttggttctggasttgttggtccctttacctcttcaccctctgccccagaggagggggaagtgtcttagggaaagatcaattatgtcatgagcttcctcttaatggaagacgagcagctgtgtgccggatcagactctctctcnnnnnnnnnnnnnnnnnnnnnnnnnnnnnnnnnnnnnnnnnnnnnnnnnnnnnnnnnnnnnnnnnnnnnnnnnnnnnnnngccatgcgtgcgtgtgcagagctctagcaagtgctcacatttgcttgtgcatgtggaggctgagatggacattgggaatcttcctctttcactttctgccccccaccttgagacaggtttatctgtgtagctttggaggctgtcttgaaactgactctgtagaccagactggcctcagactcacagagatccgcttgcttctgccctacaaatgctgggattaaaggcttgcaccaccattgactgggcctctaatcttactttttgaaatgagatct

SEQ ID NO: 4208 - DNA, 1400 bp, Cricetulus griseus
  misc_feature (112)..(134): n is a, c, g, or t
  misc_feature (1222)..(1266): n is a, c, g, or t
atgggaggagcaggaagaaaggaggtgggggggggactgggattgaaatgtaaaaaataataaataaataacaaaaccactggttgctcttccagaggacctgggttctatnnnnnnnnnnnnnnnnnnnnnnnccaaatcatgtgactagttccaggttctgatgtcagtggacaactagcataccagcatccaagtggttcacagacataatcaggcaaaacactcatacacacaaaataagaatcttaacaaaaccttctgagatgggagtgttggtgcgtgcctgtagtcctcttccctggactgaagcaaatggatctcttgaactcacaaactcaagcagttttggcaatacaatgagaccccatctcataaaaacagaaaaagcaaacagaatcactctgaagagagatccatagcctctctcatcctgctgtaggagttcgtgatctaagacactcagaatcattgtatgcttagagtggacagattgctgatggcttgtattgcctttctacaaagtgctttgcccaggtgggatttgtttattatttatttttgtttgaaggggtctttgttgatgttactagccatacctagagtagttcctagggtgattctggcaggttggggtgtgtgtgtatgtatgcatgtgtgttcatttacttgttcagaatattaagtgaatcctcatttcagtggtcgcagatcagttctttggtgccttttttcaagctcgtgaggctggctggctctctagtattaatattgctggaagcagctaagtgtgaatgggtgtttctggcaaggagcagattttcattttaattgacactttcttttatgcattaaaccatggatgccaagtgctttcctcactagtagttgtaaatgctaaatctatacatggcgttcaccacctcctgtcaagataaatgccaagcttcatttcccctcagagcagttcaaaggaataatttacccctggtttgcttgggaagatgtttgcagccagcctcacgtggacccagctgcaaaaattcccagtgcctaaagcaagctcagcagtggtgtttgttcttgtgaaacatacagcagctggaatgagaattcagattgcttgcttgttcaaatcctacagaagtggcggtggtaacgtcttaagtggggggtatgctgatgccctcaagttcagccagacactacttaacagtatagnnnnnnnnnnnnnnnnnnnnnnnnnnnnnnnnnnnnnnnnnnnnngagtgggataataaagacggtcatttctgaatgaatgccctaagaaatgaggcaggactcacatgctttctccagtgatgcgggtctctgagcagaggcatattgatctgctagtaaaaacccagggggcaggg

SEQ ID NO: 4209 - DNA, 580 bp, Cricetulus griseus
ggagagtgggcgggscmtccacccagcggtagataaaaggccagggtgtagcacgctgaggcccwgacaagcaaaggacttgcttgctctttcctcctggggcggwggtctgktttggtagtggcaagtgaargaagtagctcctggcaagtcttccttcgttgcttggcaggatggaaggtcgcagccgtgtgggaaaaatcagggtggcccgggaatcccggcgcccaaagacccttttgaaaggcatgcagaaggaggcccttctaagtcgtttcgccaagagcccttccccaagcttccgggccagggagcaactagccagggaaatcgggctgcctgagtcccgagtgcgggtgtggtttcagaaccgccgaagtcgttcggsgatggtgaggcgaggcccagaatcctcagcgagccgaagcgtcctggagtccccgaagcsgcctgaaatgtctgatgccagggcacaaggtagaaggagcagcccrtcgggacgtaggaggcctcgcactcgactcagctcgacacagttggccatcctgctccaggcttttgagaggacggtacccgggca

SEQ ID NO: 4210 - DNA, 600 bp, Mesocricetus auratus
gctttggttctcacactgtactctgaggtccaaatgactgtctgtcgtgtaacctgatgtctcaacccccagggagaagaagagtcaatctttggtgttcaccaacatgggaagcttcaccagaacaggcttttgctttgggctctgctgttggtttgcagatcacccaagagcaagccaacatgcgcttcccagcagtaccttagggttttgccattgtaaatgggtctaatgtgatatgacaagaccagagaaattggatgtaaattgacatttttggaaatgcttgttgtttcacatgatacatttagggtatgcagctccttttgtagtttttatttttactatttaagtttggaaatgatgccaaatttttgtatttctttaatcaatgtgttctccttggtgatatatattgcattatatattgatgtgtgtatcaatatatactgatatgtgttacacttacgcatacaaacacacataagtgaggggtggaaccgtagcctgcactccctagcctctgcagagagaccctaagagcagaatctcggtgttgtgatgtacagaaatggagaagagtattaaaccatatttaag

SEQ ID NO: 4211 - DNA, 600 bp, Cricetulus longicaudatus
ttccaaagaagactacaacaccaaaaggtaaaggccgaggggccaagaaaaggaaagcatcaggctcagaaaatgaaggtgattataaccctgggaggaaaccatctaaaacagccagcaagaaaccgaagaaaacatcttttgatcaggattcagatgtagacatctttccctcagacttcacttctgaaccacctgctctgccacggactggtcgggctaggaaagaagtaaaatattttgcagaatctgatgaagaagaagatgttgattttgcaatgtttaattaagtgcccaaagagcacgaacatttttcaaaaatatcttgtgttgtcctttgtcttttctgtctcagaattttgtacatctggcttattttaatgtgatgatgtaattgatggttttttattattgtggtaggccttttaacattttgttcttacacatacagttttatgctcttttttactcattgaaatgtcatgtgttgtctgattggcttgtagaattgttatagattaccgtgcattagcacagattttaattgtcatgattgcagactacagacctgctttttgaaatgaaatttaaacattaaaa

SEQ ID NO: 4212 - DNA, 600 bp, Cricetinae gen. sp.
tctatggccgtatctacgtggaagcccgctctcggattttgaaacagacacccaacaagaccggcaagcgcttgacccgagcccagctgataacagactcgcctggttccacgacctcggtcacctccattaactcccgggctccagacstgcccagcgagtccgggtctccagtgtatgtgaaccaagtcaaagtaagagtctcagacgccctgctggagaagaagaaactcatggccgctagggagcgcaaagccaccaagaccctagggatcattttaggagcctttattgtgtgctggttgcccttcttcatcatctccytggtgatgcctatctgcaaggatgcctgctggtttcacatggccactcttcgacttcttcaattggctaggctatcttaattccctcatcaaccccatcatctacaccatgtccaatgaggacttcaaacaagcattccataaactgatacgctttaagtgcrcaggttgacttgtcaatggcagtggggtcgcctaggcgactttggggaccaagttgggtcttttcacaggtaggtcaaatcttctttccctgttactgggtggaagcaaggcc

SEQ ID NO: 4213 - DNA, 602 bp, Cricetinae gen. sp.; identical to SEQ ID NO: 571

SEQ ID NO: 4214 - DNA, 600 bp, Mesocricetus auratus
cacagaaagcctatcaaagaccttgtgtgtgtgtgtatgagtgtgtgtatgagtgggttgtgcgtgtgagtgaatataaatatatataaatacatataaataaatatatatatcctctgtataaaatgaggtttcagtacaaaaggaaccatgggtgaccctgtgacatcatccactgtcgtttttccatcccatccccatcacccacatgacagaatcttccccaggcaatttcaaatcacacagtgaataaagcacttacagaatatccattgacattttcaagtaatcccctagccttctctcttagagtcattagaggcattagtgatggcgggaatctctggggtcactctcaagcaatgatcaacatttaatgcatttgtaatcacaacaccaggcaagttgtggtgatggaggccaacctgggttacatagtgaggctgtcttaaacatatggacatttggtttccctttcttagcttcagctaagctcttcaaggtaaagatagggtatacccatagaaattagtcacaagaaatcaaaataccactctatctttgtagaccatactattagttgtatggctaaatgaatag

SEQ ID NO: 4215 - DNA, 481 bp, Mesocricetus auratus; identical to SEQ ID NO: 573

SEQ ID NO: 4216 - DNA, 600 bp, Mesocricetus auratus
ctcaactagcactttctttccccttagtttagttgttggaggatagaatctgtatgtgactgacagctagctggctttcttagtcttgagtaatggctcacacctgttttccttgttcatctcatctgagtgtcaagagggatagaggtggatggagtagggcagggtggggcagcttaaagaattccaggactccctacaggctagggaggacagttagaagtcaagatggaccatgactctctttttaaatggccaggcagattaggagctggcatgaacaacagccaagcacccattgccaggggcagagacagaaagagatctggaatgtcatcgcctctaaatttaggtcatgtcaagctttctgcagaaaggcgtgacatagcaactccaggttgcaagattgtgcagagtagtgcccaaactgggaagaaactctgagttcctattttttttttcgttagtttttttttttaattttaaatagcttgttttacatgtcaatcccagttccctctccctcccctcctcccgcactccccttccaccctccctcccaccctattgccacatacttccacataggggatgtctaga

SEQ ID NO: 4217 - DNA, 600 bp, Cricetulus griseus
tcaaacccattttcaactggaatctgtgctatttcatgtatagattaactagaatctaatttttaaattttcatcttacttccaaaaatatttgtccaaatactctgtgaatgcattagtttcttatgggaaaacatcatatcttttgatcaatgtgtttcttagcttgaggttctctccaaacaggaccaagacgaggccaggaccaatgtgatacaacccatagtcctcaagaaatagttgtcatttcttattccaattgcatcccaaggtctcatctcattttgcgtgtgcctttgacaccccatacccacataaactaaggtggtgttattttttgaggccctgaaggtatcttcaggaatccataagtgagccttaagctgcatctggatataggaatctgaaagtgtcccttctctgcatgatctcttctttcagtttttcaagtcagtgtgccacaggaatcaggaacgataaatggagaggggaagtgcagttgcttggtatagacaccccagaggctatttgcatcctgtccttcaaaatctctctgagccttcctgcctaagccttgttttgagttgggtttgtggtacc

SEQ ID NO: 4218 - DNA, 1400 bp, Cricetulus sp.
  misc_feature (565)..(579): n is a, c, g, or t
gaccaaaattccccaaaaaaatactaagaaagcactgaagccacaaaagagtgccatgtctggtgaccctgaaagtgatgaaaaggacagtgtgccagcttctccaggccctcctgctgctgacttgccagctgacactgaacagttaaagccatcttccaaacagactgtggcagtgaagaagacagccaccaaaagccagtcttcaacatccactgctggtaccaaaaagagagctgtaccaaaaggaagcaaatcrgattcagccttgaatgctcatggccctgaaaagcctgtgcctgccaaagccaagaacagccgcaaaaggaagcagtcctcttctgatgattctgactctgattttgagaaagtagtctccaaagttgctgcaagcaagaaatccaagggagagaatcaggatttccgagtggacttagatgaaactatggttcctcgagcaaaatctggacgagcaaagaagcctatcaaatacctggaggagtcagatgatgatgatcttttctgatggggagagtattgttttagcaatggttttactgagccnnnnnnnnnnnnnnnttatttgaagttcttctctaaccccctctgaatttagtttggggaagactttttataagactatcctacgtggccatcagctttatattctatatactgtctcagtgatgaccatctcatgacactgttttcttctctgatttatctatgttttgtgtctatttctttggtctctaaaatcttgcttgagattcttttggattccacataattatatgctcacttcagcatgacagaatttattgatcatatgttaagctaaaatgggtatgttttcaaaagtgtgcctctacctcctttcctatgtctactaagatatgaatgaggtagcaaggtgtttctttttcagttgtgtaggtagaattccatcacatagaactagacagttctagtatggatacagtgttcaacctatgatttgatgcatttttgtttcagccataaaaaattactcataactcttttaaacatcatcagagkctgaagaaagtcatcttgactgtgtctccatgatctcagtacatgtagcaagaaaaagagagttagtctggttatgtggcatcctgactttccttatgatacctttcgaacatgagatcacagggaggagacagaagtgctcagacttacatctgcatgctcaattgtgaaatgtggtccattgcaagtgtacagagttccaacttgtgaacgccaaaagcattctgtgctrttgtatgttacttaagtgctgttatcaatgtgttttgtaaatatttaatatgtctttctatrtagcttattccaacaattttgtacattaataaatatttaaacattgt

SEQ ID NO: 4219 - DNA, 1400 bp, Cricetulus griseus
  misc_feature (439)..(481): n is a, c, g, or t
ttcaagctacagatcgagaggaaaataaacaaatagccttgggaacctctaaacttaattatctggaccctaggatcacagtggcttggtgtaagaagtggggggtcccaattgagaagatttacaacaaaacccagagggagaagtttgcttgggccattgatatgaccgacgaggactacgagttttgaccagtcttgccaggggttctatgaaaagggacagtgtggtttgaggaagatggataaactgagcctcacttgccctcacacctgagggagaggccacaagtcttaacaaaccaacatctttgcaaaaagatagacctggagatgttataagggagagctgagccagttgtcctatggacaacttatttaaaaatatttcagatatcaaaattctagctgtatgatttgttttgaattttgtttttatnnnnnnnnnnnnnnnnnnnnnnnnnnnnnnnnnnnnnnnnnnnggcaaattcagttttgctgcaatgtttggattctctcagctactgtatgcaaagtctgattatattggtgcgtttttacagttagggttttgcaataacttctatattttaatagaaacgaattcctaaactccctcctctccccatttcaggaatttaaaattaagtagaacaaaagaaaaacccagcgcacctatttagagttgtcactctatcgtcacgggaatcagttttcattaaacttgaagcagttatgacatcggcagtgttttggttcagacacctattcacagaaaagcatgatgagaaaatatttcctgacttgagtgttcctttttaaatgtgaatttttatttctttttaattattttaaaatatttaagccttcttcttgatcttaaagatcgtgtagcttggggttggggagggatgaagggtgagtgagtctaaggataatgaaataatcagtgactgaaaccattttcccatcatcctttgttctaagcattcttgtaacctttaagagatccatctttttctttggaaaccccagtctttcatttgaaagattttattgtatcaaaacttccacaggtcagtaaatttagaggaaaatgagcatttggtccaagaaaaaaaccaaaaccccaaaaaacaaaaaaggaaaaataatcaagattttagggcttttattttttcttttgtaattgtgtaaaaaatgggaaaaaaaagaccataaaaagcagaattttaatgtgaagacattttttgctataatcattagttttagaggcattgttagtttagtgtgtgtgcagagtccattccctcatctttcctcaagtatcttctatttttatcatgaattcccttttaatcaactgtaggttatttaaaataaactcctacaacttaacgg

SEQ ID NO: 4220 - DNA, 218 bp, Mesocricetus auratus
  misc_feature (175)..(177): n is a, c, g, or t
tccctgtaaagggggggtgcagagagaacttctgaagtttttatttattttttatatttatatttatttattattcatttatttatgagaatctgctttggtgccaggtctggctaggtactgggaaataaatgggatataaggtggactaagttcccactatcatttagtcccnnnctctaggaccagcctctcatataagaagttatcacataaat

SEQ ID NO: 4221 - DNA, 600 bp, Mesocricetus sp.
  misc_feature (558)..(572): n is a, c, g, or t
cagaacttctgcattcatggtgaatgcaaatacatcgagaacctggaggcagtgacatgcaattgtcatcttgactactttggtgaacggtgtggagaaaaatctatgaagactcacagcggtgatgacaatgacctatccaagattgcattagcagccataactgtcttcgtctctgctgtaaccttgatagctgttggcatcgttgtcatagtcctgcttcgcaaacggcacctcaaggaatatgaagaagaagcagaagagcgaaagaagcttcgtcaagaaactggaaatgtgcctgtcatagcctagttgaagacaattcaggttaacagtcatgtcactgccaagtagaagcaaaaatacccacattggtcctcttctctatgaaggaagtggagcctcctgatggttccagtctctcggttgtcacttttcatgacggtcttatttctgtacataatgagatgtgtggagataaagtattttttcatgttgtaaataatctatttatatttaagtcgttatttatcttatagcttcattaaactttttttnnnnnnnnnnnnnnnacaggggactaattatctacacattcat

SEQ ID NO: 4222 - DNA, 306 bp, Mesocricetus auratus
  misc_feature (191)..(193): n is a, c, g, or t
  misc_feature (201)..(201): n is a, c, g, or t
  misc_feature (205)..(208): n is a, c, g, or t
  misc_feature (255)..(255): n is a, c, g, or t
  misc_feature (270)..(270): n is a, c, g, or t
  misc_feature (280)..(280): n is a, c, g, or t
taagtyaaactcacagaatgtgtggtacgtgcccggcctttgctggcagggtcacaccgattatagcatttaatctccactgccaccccacacagtaagaactgttatcactgtcatttcgcagataggaaaattgaagctggaaagagttaggtaatatctcaaagtacgttgtcagaagttagaatttnnntacagacncccnnnnctctggtgaccatgatatctgttgtctcccaaatcactaataaggangctgtattatagatngctaccaagntgccttrgttctattmtaawyagaat

SEQ ID NO: 4223 - DNA, 561 bp, Cricetulus griseus
  misc_feature (442)..(472): n is a, c, g, or t
  misc_feature (546)..(560): n is a, c, g, or t
ggggtctaagtctatggtctatcttgctggcctttgtctcccgcattgacaaatctttttactgttacccatggaaaagagagggctcttattgactacatttgatcygtctattttccctggtratcttcccagtcctcmcttcaagatgcttgaagtactcaagagaatcyaatttatgcactttgtacatttgatccgttagctttgaagggcgaagtggttgggggtggtttttgtctgttttatgtttgctcaatcagacatcaaaagtgcttatctttaaaagtgcacttaaatttcaggagaaaattttatctttaattcatttcatatttatagagattaaacattttaatataattaacttgaagttcttttcttctctctctttctctctttctctctttctctctttctcccttccttccctccttccttnnnnnnnnnnnnnnnnnnnnnnnnnnnnnnnttccttccaagacagggtttttcccgtggctttggaggctgtcctggaactagctcttatagaccgggctagtnnnnnnnnnnnnnnnt

SEQ ID NO: 4224 - DNA, 141 bp, Cricetulus griseus
tattttttttgtttttgttccttaactattgagcctcagccagtgtgggtccttggggaaaatatcattccagaagaagttatccctccagggaaattggattttactgggtaaattagtacttttagatcatatcctctc

SEQ ID NO: 4225 - DNA, 574 bp, Cricetulus griseus
gtccttcaggaagagcaggcctccctggaagaaggagaaattccttggctccggtacaatgagaatgaaagcagcagtgaagcggataatgagtccggccatgagatgatgcagcctgggatgttcgtgctggatggaaacaacaacctggaagatgactccagtgtgagcgaagacctagaagtggactggagcctatttgatggctttgcagatgggttgggagtggcagaagccatctcctatgtggatcctcagttcctcacctacatggctctcgaagagcgcctggcccaggcgatggagactgcccttgcgcacctggagtctctcgccgttgatgtcgaggtggctaacccacctgcaagcaaggagagcattgatgcgcttcctgagatcctggtcamtgaagatcatggtgcagtgggccaagaaatgtgctgtcccatctgctgcagtgaatatgtgaagggtgaggtggcaactgagctcccgtgccaccactatttccataagccatgtgtgtccatctggcttcagaagtccggcacctgcccagtgtgccgctgcatgt

SEQ ID NO: 4226 - DNA, 581 bp, Cricetulus griseus
gcctccggaggtgcaggagctgagcagtcggcgacctattgcctcaacatgcttagccaaatgccgggggagattccattctctagggcagcgagtgtctgtgcaaccacyaccttatcttwttttgtttgggttttgagtctacacacagtcccaagcataaacaccacaccactgcagagaattgtgccaaatgtcccacccccacccattccttaaaataggagacagctgaagcgatccatgatgacaatccctccgtcaaggacaggtcaaggtgcatggagttaatctggataatagcggctctcaactcccggggagagggtggagttccgacttttgagggtccgaaggggctcttagggtgagtctttccgggatccacaggggattctcttcatccaccctgcagttctgaatccgccccgtccgaggggtctccgcagtgccggcgatgttaacaagttcccgggtttcggcaccagatgtcccgcgcgatcgtctcgccagcaagaacaacacaggacactcgsmymcktctgcagtaaagctttaatgcatcttgagagagagagcat

SEQ ID NO: 4227 - DNA, 569 bp, Cricetulus griseus
  misc_feature (286)..(311): n is a, c, g, or t
  misc_feature (350)..(366): n is a, c, g, or t
ctcagcgccgactgtccgcttcccgccgggtaggcctctcctgtgccaactgccagaccaccaccactacactgtggcgccgcaatgccgagggcgagcctgtgtgcaatgcstgcggcctytacatgaagctccatggggtacytaggcytcttgcaatgcggaaggaggggattcaaaccaggaaacgaaagcccaagaacctgaataaatytaagacatcagcaggtcctcctggtgagagcctccctcccagcagcagtgcctccagcaactccagcaatgnnnnnnnnnnnnnnnnnnnnnnnnnngaaragatgcgtcccatcaagacagagcctgggttgtcnnnnnnnnnnnnnnnnngcacctccatatcccaggcattytctgtcagttctgtgtccggccatgggccctccattcatccagtgctgtcggctytgaagctctccccmccaggatatgcatctcctgtcactcagacatcacaggccagctccaagcaggactcttggaacagcctagtcctggctgacagtcatggggacataattamtgsgtaacta

SEQ ID NO: 4228 - DNA, 514 bp, Cricetulus griseus
aggtgtggtcattgctgacagcgaatatccttccagagtggcctttaccttgctggagaaggtactagatgaattctccaaacaggtggataggatagactggccagtaggatcwcytgctacaatygagtacacagccctggatggtcaccttagtagataccagaacccccgagaagctgatccaatgagcaaagtacaagccgaastggacgagaccaaaatcattctgcataacmccatggaatctttgttagagcgaggcgagaagcttgatgacttggtatccaaatcagaagtactgggaacacagtcgaaagcgttctataaaamtgcccggaaacaaaactcatgytgtgcaatcatgtgatgtagcccccagaggcaggcgctggatcgtcatgtcacatcagaactatagcccctggaggtgaagcgataccctagaagaagatctggagccaggcagactggctgtttttattttgaagttctcaagaggaatggaggtagt

SEQ ID NO: 4229 - DNA, 574 bp, Cricetulus griseus
ttttttattaagtttatttattatgtaaacgtgttcctgtatgcatgtatgcctgcaggccagaggaaggcaccagatcccattatagatggttgtgagcccccatgtggttgataggaattgaattcaggacctttggaagagcagccagtgctcttcacctgtgagtcatctctccagcccctcctttgaatttttaaagaaaaatatattgatataatctcttaatactggtccatagctgtgtttctaaaatgaacgccaatgatttataatgacatttaatttgattttttgatatcagttcatgatatgtttgcccaataatatatgttgttagaatatgcttctttagctacagaatgtacagacatttcattgttgccttctcttttgagaaggggacatgttgaatttgtttgaaccattgcattcttgaaatatgctttgatgttggccagtttttactaaatttaagtttattttgtgattaatgaaataatcaggcatatgtcctcaaatagctatgggtacagcccagcataaaatcataaccctaaaacatcctaagaca

SEQ ID NO: 4230 - DNA, 579 bp, Cricetulus griseus
tattgagggtgctgatgtaaatccccactgcttatcttagaagtttcaccccttcttccttcattaaggccacgagatttgtgtcaggctcatctttggcaaggctcacactaatctccacttcatccacactgttttcatcagacaaattggggatttccacatgtcctttgtattgcactcctgacttagaggtacctgtccagtttaatttgatggtccactcataaaagaagatcagtttgcctttccggttgttaatggacgcctctccatcaagcttgttcacttccgtcacctcacatttgccctcctcattttctactcgaactgccaggaatagagttttcagcttttctgtggaccaatttgaggcatccctttctgtccagtgccagttgttgacgttggtggcgtccgcccgctcctccacgatccagcgtgggtctccctcaccccacttggccatcagctcacacttcgcgccgctaccagctcccaagcagccgcagccacagcctcaggaccgctcggtcccagccgcccggcagcgcctggaaactactagaagcggcagta

SEQ ID NO: 4231 - DNA, 249 bp, Cricetulus griseus
  misc_feature (43)..(97): n is a, c, g, or t
gtggacccggaacctctcagggtcgcaaacggaggcagacgannnnnnnnnnnnnnnnnnnnnnnnnnnnnnnnnnnnnnnnnnnnnnnnnnnnnnncctaatgtgcccacaggaggcctcaccctcttctgcagtgggccaggaggccccctccccaccttctgccttagcccttccttcactctgtgtgtcttaattattatttgtgttttaatttaagcgtatcctgtatatactctgcctgccct

SEQ ID NO: 4232 - DNA, 1400 bp, Mesocricetus auratus
  misc_feature (438)..(458): n is a, c, g, or t
  misc_feature (649)..(668): n is a, c, g, or t
aactacagaacaatgtgctaagcagtgctaaattgttctcatgaagaaaacagtcactgcatttatctctgtaggccttttttcagagaggccttgtctagatttttgccagctaggctactgcatgtcttagtgtcaggccttaggaaagtgccacgctctgcactaaagatatcagagctcttggtgttacttagacaagagtatgagcaagtcggacctctcagagtgtgggaacacagttttgaaagaaaaaccatttctctaagccaattttctttaaagacattttaacttatttagctgagttctagatttttcgggtaaactatcaaatctgtatatgttgtaataaagtgtcttatgctaggagtttattcaaagtgtttaagtaataaaaggactcaaatttacactgataaaatactctagcttggnnnnnnnnnnnnnnnnnnnnntagcgttgtccaggaaaccctgcttgcttgccaagcctaatgaagggaaagtcagctttcagagccaatgatggaggccacatgaatggccctggagctgtgtgccttgttctgtggccaggagcttggtgactgaatcatttacgggctcctttgatggacccataaaagctcttagcttcctcaggggnnnnnnnnnnnnnnnnnnnnttaattttttttttaatgtaccagttttgtataaataataataaagagctccttattttgtattctatctaatgcttcgagttcagtcttgggaagctgacatctcatgtagaagatggactctgaaagacattccaagagtgcagcggcatcatgggagcctcttagtgattgtgtgtcagtattattgtggaagattgactttgcttttgtatgtgaagtttcagattgctcctcttgtgactttttagccagtaacattttatttacctgagcttgtcatggaagtggcagtgaaaagtattgagtattcatgctggtgactgtaaccaatgtcatcttgctaaaaactcatgttttgtacaattactaaattgtatacattttgttatagaatactttttccagttgagtaaattatgaaaggaagttaacattaacaggtgtaagcggtggcttttttaaaatgaaggattaaccctaagcccgagacccagaagctagcaaagtctggcagagtggtaaactgtcctgctggggccatccaatcatctctctccattacactttctaactttgcagcattggtgctggccagtgtattgtttcattgatcttccttacgcttagagggtttgattggttcagatctataatctcagccacattgtcttggtatcagctggagagagttaagaggaagggaaaataaagttcagatagccaaaacac

SEQ ID NO: 4233 - DNA, 600 bp, Mesocricetus auratus
  misc_feature (51)..(94): n is a, c, g, or t
  misc_feature (372)..(401): n is a, c, g, or t
ggggcaacccttgtcccaagacaagtatgtgaccagcgccccaatgcgggnnnnnnnnnnnnnnnnnnnnnnnnnnnnnnnnnnnnnnnnnnnngtgacagaggaggaatggaactccggggagacctacacctgtgtggtaggccacgaggccctgccacacatggtgaccgagaggaccgtggacaggtccaccggtaaacccacactgtacaatgtatcgctgatcatgtctgatgcaggtggcacctgctactgaccatgctagcccccaaccaggcaggctctggggggccagttgcactgtttacacaaactaaccatgtcagagtgagatgttgcatcttataaaaactagaaataaaaaaaaannnnnnnnnnnnnnnnnnnnnnnnnnnnnntgcaatgcttttggctgccgaggcaacggctgtgttgtgtttgccttgcacgcaccctgcagatttgcctctgccctgacccttcctctgtctgcacagttgcctccttctgtgtgaactcacagagtgtaaggatgccatccctccagctgcttccagatacagggctggaagcgtggctaccctggtgcaggcagaa

SEQ ID NO: 4234 - DNA, 531 bp, Mesocricetus auratus
ccgggatgctcctcgtggttgtgctgacctgcctcagcgtcatgatcataatgtctgtgtggaggcagaggagactgttgaggaagatgcctccaggacccaccccactgccctttattgggaactttctggagctggacacagagaagttttatgactgcctttcaaaggtagtaccgggcagggagatgggtgagtttgacaagtggtgtctgggagtccgaggcgggagtgtgaggcagaagccggaccaggtcagaatgtggacataggatgggggcctaggggtctgcatccaagtccctgacattgggacaatggccgtcctaagagtggcttctctaactcctggcgtctcccctcagatgagggagcggtatggccctgtgttcaccatccacctggggcctcgccctgctgtgatgctgtggggttacgatgctgtgaaggaggctctcattgaccaggctgaggagctcagtgaccgaggagagcaagctttcttcgactggttcttcaaaggctatggtg

SEQ ID NO: 4235 - DNA, 402 bp, Cricetulus griseus
  misc_feature (45)..(85): n is a, c, g, or t
  misc_feature (113)..(169): n is a, c, g, or t
  misc_feature (174)..(196): n is a, c, g, or t
aagatccaggacaaggagggcatcccccctgaccagcagaggttnnnnnnnnnnnnnnnnnnnnnnnnnnnnnnnnnnnnnnnnntccgactacaacatccagaaggagtctnnnnnnnnnnnnnnnnnnnnnnnnnnnnnnnnnnnnnnnnnnnnnnnnnnnnnnnnngacannnnnnnnnnnnnnnnnnnnnnntgagcccagtaacaccatcaagaaaagcaaacaggaagatggacgcacctttctcactacactgtctagaaagagcacaccttgtgcttgttcttgggcttgaggggaggtgttttaatttaccccatcttttaagttgttaacaagtttcattgcactttgaataaagttcttgcattcccaaaggtgttggatctcgttttagc

SEQ ID NO: 4236 - DNA, 1380 bp, Cricetulus griseus
ctgtggcatgaagaccctcgagtggctgtccctgaagacatataagtggcagggcctctggaacattccaacctacaagggcaagatgaagaggattgcttttcagttcacgccctacagctgggtacgctttgagtggaagccagcctccagcctgcaccgctggctggccgtgtgtggcatcatcttggtgttcctgctggccgagctgaacacattctacctgaagtttgtgctgtggatgccccctgaacactacctggtcctcctgcgcctggtcttcttcgtgaacgtgggtggtgtggccatgcgtgagatctatgacttcatggatgaactgaagccccacaggaagctgggccagcaggcctggctggtggcggccatcacagtcacagagctgctcatcgtggtgaagtatgacccgcacacactcaccttgtcactgcccttctacatctcccagtgctggactcttggctccatcctggtgcttacgtggactgtctggcgcttcttcctgcgggacatcaccatgaggtacaaggagacccggcgacagaagcagcagagtcaccagggcagagccatcaacaatggggatgggcacccagggccggatgatgacctgctagggactgggactgcagaggaagaggggagcaccaatgacagtgtacctgctgaaaaggagggggcctcagccgcctcatgatcctctccctctttactggccttatgcctgccatagggctgtcccatttctcccgtccttatgctccctgcttcagaggaggtggggggcccattcccaactccaccaggggcacctgagtgtacatgtttgtgtgcaggtaggtgtgtgcacatattggctcctgacacgtctccagggctgtgagctcctcagtgagcctggagcttgctctagagcaagggtcctgccctgtccttctacctggtcagccaaggcactggcccatggtctctcctgtgttcagtctcagcacaggccaggagaggcatgtcagtactctttctctaccctctgtggggcaaacagaagccccatgcaccctgtggcctcacccaacttgcagcagcagaagtgaaggatgttacaacaccaagatggtctcaaagtggtgggtctggagtcagtactgagctgtggcctttggagccttctttaaccaggactctaagctgagggtgtgtaatggagggggtcaccagatgggcctcttgagggatatcaagtcagagagtccaacttggagacctgtataccacaggtgctagggttgtgttgtcaccatggctcccagagtttatagtcatattcttgagcaaacagaacaaataaagtgatgatgaagg

SEQ ID NO: 4237 - DNA, 600 bp, Mesocricetus auratus
  misc_feature (370)..(447): n is a, c, g, or t
atccaaggacattgcccctaccttaaaactctacgtgggaaaaatgcagccggtggagattgagaaggtggttatccaccccaaccgctctgtggtggacattggggtcatcaagctcagacagaaggtgcctgtcaacgagagagtgatgcccatctgcctgccttccaaagactacatagcaccaggccgcatgggctatgtgtctggctgggggcggaatgccaacttcaggtttactgatcgtctcaagtacgtcatgctgcccgtggctgaccaggacagctgtatgcttcactatgagggtagcacagtgcccgagaaagaaggctccaagagttctgttggggtacagcccatcttgaatgannnnnnnnnnnnnnnnnnnnnnnnnnnnnnnnnnnnnnnnnnnnnnnnnnnnnnnnnnnnnnnnnnnnnnnnnnnnnncgacctggagcaggacacctggtatgcagctgggatcctgagctttgataagagctgttctgtagctgagtatggcgtgtacgtgaaggtgaactccttcctggactggattcaggaaaccatggccaagaactagtgcatactgactggagg

SEQ ID NO: 4238 - DNA, 600 bp, Mesocricetus auratus
tgaaggaaagggaagcatggagcaagagagcgaaaggatgtgggaaagtggtgtcccatgacctggcatttgagctcaaactaattcctgttcaggttggatatgaatagcaacttctgtctaacctcagtccttcttgggctgagaggccaaatttagaggcattgctgtcacctaaggtatcttgtatgccttcccttgatcatgataatgttgtagtctttgaccacttaaggaaatccctcagcagaaaatgaagaataaagtgaatgtatttgttttccccaattttaatagcaatgatgaatcctttcatcaggcaagagttggaatgtgtaagtacagttgagctccgagaaccatataaggacgctagcaggcaaattacacctgtttgtcattgttgtggctcactgaaaatctctagtttggggacagaagtgttttctaccattgcctgtgtcagatggaattgagaggaaaccagctgtatttccttgttttattattcctctaaagagatatatatgttttgataaaaatctcttgtttctggtgctcagagtattgtatagatcaaacattgacttgttggaattc

SEQ ID NO: 4239 - DNA, 1400 bp, Mesocricetus auratus
  misc_feature (325)..(347): n is a, c, g, or t
cactgtgggtcaaacccagaacttcacagatgctaggcaagcactctccatcctcagaccccatccttcctcaccacaggtctataacagtcctcctaggagcccacaacaaaaaggtaaaagaagacacgtggcagaagcttgaggttgaaaagcaattccctcatccaaaatatgatgaccgtttggttctcaatgacatcatgctactgaaggtaacaagtttctccctccattccgctcccttgcatttttccttcaggtccccattgctctgagctttccccgccctgcttcaggaaggcactcccttcttatccccccnnnnnnnnnnnnnnnnnnnnnnnctcacacacatgcacgcacgcacgcgcacgcacacacatgcacacacacgctcacacacgcgttcacacatgcaccattggacttggtatcttgccctttccctccctgatcgtctggagctgcctcctactccacggccctcactaagagccccttgttcccttcacagttgaaggagaaagccaacctaaccctaggcgtgggaaccctcccaatctcagccaaatcaaactccatcccacctgggagggtgtgccgggcagttggctggggccgaacaaatgtgaatgaaccaccctcggacactctgcaagaggtgaagatgagaatcttggatccccaagcctgcaaacacttcgaggattttcaccaggaaccccagctgtgtgtgggcaatcccaagaagattcgaaatgtatacaaggtgatgctcttactagtttttttttttcaaaaaccgctgctgggggcattgagtgtagaaggaggcggggcagaagattgtcagttaatcacagtttagggatcacaggcgctaggaaacaaagtatccatcttccattagctgtgcagagaatgtgggttatgtgaggtagctaccccaggaaagaaagatgcagtatcaggctcctcctctgactctagacctaattgcaactccaaggagaaatgggcgggagaggtagaggcattcatgcatttcctctctgtgcctccctaacagggagactctggaggacctctcctgtgtgctgggatagcccaaggcatcgcatcctatgtacttcggaatgcaaagcccccttctgtcttcaccagaatctcccattaccggccctggatcaataagatcttgagggagaattaactctggagcttggagcctgtgattaaatctgaagctggaattgagcaggtcttttgaccatgtgcttgggcctgtcttagttcctgcggaagccctgccagctccctgatctctctgaaggttcttacttgtctcagaaggttcctaaaggtcaataaacctcaataaagacccagattctaga

SEQ ID NO: 4240 - DNA, 1400 bp, Cricetulus griseus
aacagaacattgagtgaagctggaaagtcaacttccattcagagttttaaggacaagacgatcagctccagtctggcagttgtggatttaattgatgccatccagccaggctgcattaactatgaccttgttaagagcgggaatcttacagaagatgacaagcacaataatgccaagtatgcagtgtcaatggctagaagaattggagccagagtatatgctctccccgaagaccttgtggaagtaaaacccaagatggtcatgaccgtgtttgcatgtttgatgggcagggggatgaagagagtgtaaaataaccaatctgaatagaaccatccttactcacaggtgcatgattggcaagtcagctattcccaggtgaagtgctcatggcttaaagaattctcagtcatttaaaggacttttagttttgattaacaagactagctcatcatgacagccttcggggaaagacttttagaaacaagcaactcctttcccttccagttggatctgttcagcacacctgaacatgctcacagccggccatctgctctctcctcctagaatactgcccttgacatttcctgatgcttgtgtattacctctctgtgtatcttttcctcttaggctgtccatctcttgagacttgcttagatcggtagatagccatagtattaacttgccattttgctttccaagttcttactggagaactgtggtcagatactatgtggagatgtgagtgtccttgcttactttgtagtgctgaaaatctgctcatgttactggctgtgcagaatatactagaagcttttctcattcttttattcttaaaagcagtatctttttacagtattctttctacatgattatttttttgtacatttaagaatattttgattacggtcaacaagtctgctgatttgttacttttttaaaggggacttcaagtaagtaaaagaaaaagcataaactatagggggaggaaaatggaccctaagtttgttgtatttccccctcacacccaggatcaaatcaaatgaaatactttgtcttcaatgaatcagttcgacacatgcttctttgttttgaacactttatcacaaaactctcatttgatctaaaatgctgttgaatatgacacctttgaggagagagtgggctcagaatttagatgggactcaataagcaaagtatgctaagtgtacaatagatttttaaatttaacgcatctaacaaggagatgtggtcacgaaaaggggaaagtatgtatgtcggacttgatgttctcttcctttgtcaagctttttgctgtagttctcaagatcatatgttaatctaactctgaaaagtgatgtaatctggtagcaacatagtactccaaataaaggcatttgcat

SEQ ID NO: 4241 - DNA, 462 bp, Cricetinae gen. sp.; identical to SEQ ID NO: 599

SEQ ID NO: 4242 - DNA, 600 bp, Cricetulus griseus
tggtcatggaggctacgggctcacaattcactggggttgtgcaatggaggcagccaacctctttgggaaaattctagaagaaaagaagttgtccaggatgcctgcatcccacctctaaggactctagtgaccatcacttgccccttgaggacatcccagtaccctacagccaattaagtgatagtctccttgctgattcttcactccccgctccctggcttccttgggcaaaggtgtgaggtgaggaaatcctggcactctgctcatccgtcacggcctgtccttcccacacatccatctggcaaagcatctgtaggatggatcctggctggtcctaagcccatctatatgagacaggcagcatctaggaccatgtagcaatcctgttctcacaacaggatgactgtactaaagctggttgtactgggtggcagggtctgggctcagttccctaagaggtggtccagaaacttttgcttagaactctgaagagtgattcacgacacacttgctgtctaccagtagtgacgggaggaggggggactcctgccctcagcactccattggtcaatactattaaaacactcttgggatatccct

SEQ ID NO: 4243 - DNA, 600 bp, Cricetulus griseus
ccaggtcggcaggtgaagctgtgggtgaagatggtaaccccactgatcaagaacttcttctgaggacaggaatggccttgatgaagatgacaggcatggctggtgtgagatccttcagccgtgcttctgcaatgactccggtctgggtgtcccagcgagctcctgtggggacaatgtaactgacggtctgggtgacctacgggaggctgaggcgatgttgggcgtgctgaccatgaataagggagccaccagcagggaggaaggcctggcctccaacctccccaggcttttcagagatgggccagtgaagggggagccccgaagtgttcaggccaggtgccaggggccgaaaatgccaaacatggggtatgaaccaaggactcagaggtgaccgcatgtcgtaatggctctgaggccgcgtctcttcagaggcccatctcagccttctgaatgtcagcggcagaaaactgacggaggctgaagattccagcattgccccttcccgatcgttcccgtgtaatgaatatctaccctgtgtacatagggaataagttatatatataatgtatgtatatgcctatataaacactatctgccctt

SEQ ID NO: 4244 - DNA, 234 bp, Cricetulus griseus; identical to SEQ ID NO: 602

SEQ ID NO: 4245 - DNA, 600 bp, Cricetulus griseus
cagccagtgcctagccatgtcacgctactaccggcggccagtactgctcatcgagttcgatgctggtaagcccttctccttggcgccacgcggttccttcttccaggagatgagtagcagcgacgtgagctccaagctcacgctcctcaccctgcacttcccgcgcctgcggctgctctggtgcccctcgcctcatgccacagccgagctgttcgaggagctgaagcagaacaagccacaacctgatgcagccacggccatggccatcactgcagactcggaaacgctgccagagtcggacaagtataaccccggcccccaagacttcgtgctaaagatgcctgggatcaatgccaagaactgtcactccctgatgaatcacgtgaagaacatagcagagctggcctccctgtcccaggagcggctcacgagcatcctggggcatgcgggaaatgccaagcagctgtacgacttcctccacactgcctatgcagacgtggtgtccggaggcagagtgagaaaatgaccgaactcagatcgctgttcattagtatttgcagagcagttcattctttcccagggcttttagggatgggcatt

SEQ ID NO: 4246 - DNA, 650 bp, Mesocricetus auratus; identical to SEQ ID NO: 604

SEQ ID NO: 4247 - DNA, 600 bp, Mesocricetus auratus
atattattcattgaattttttttggcttttcaagataggatttctctgtattgtttttgaggctgtcctggaactctttctgtaaaccaggctgggctcaaactcagagatctgcctgactctacctacactttgttattgtgaatatcttgctattcccattgcatattaaactttatcatgggtatacctatgtagaaaagagcacagcgtgaacagagttcagtattatttatgcttctaggcatgctctccagaagataagttaggctactctgcatggattgaggacacacttctcagaggaaatgagttggagaaaatgtcagaaaaatcaaaacccattcatagtggaagataataacttcacagggtcttatagtcaaatgaaattgcttgatttaaacattatggaatctcagggaatctattagtgagagttcagtgctaaagctaaatgagacacttctatcaccctaaggatcagggctcactaaggaataaggggaggaaagactctaagaactgggaaacagggagaagagctgtgaactactgactcctaggcatggcacaaccaaggcagtcattaccttactg

SEQ ID NO: 4248 - DNA, 361 bp, Mesocricetus auratus; identical to SEQ ID NO: 606

SEQ ID NO: 4249 - DNA, 360 bp, Mesocricetus auratus; identical to SEQ ID NO: 607

SEQ ID NO: 4250 - DNA, 1400 bp, Cricetulus griseus
  misc_feature (189)..(217): n is a, c, g, or t
  misc_feature (283)..(308): n is a, c, g, or t
  misc_feature (865)..(941): n is a, c, g, or t
  misc_feature (1010)..(1032): n is a, c, g, or t
agcccttacagttatggatacaatggtctgggctttaaccgcctccgtgtcgatgaccttccacccagcagatttgtccagcaagctgaagaaagcagcagaggtgcatttcagtccattgagagcattgtgcatgcattcgcgtctgtcagcatgatgatggacgccaccttttcagctgtctataannnnnnnnnnnnnnnnnnnnnnnnnnnnnatcacttttcccgcttaaaaatacactttacaaaggttttttccgccttcgcattagttaggactnnnnnnnnnnnnnnnnnnnnnnnnnngtggatgatgggcttaagaagaggctctgagagcgaggacctatgggaggaaagtgaaagaactgtggcctgccttggtgccgaggaccaagcagctaactctgcaaaatcctggccaatattcctgttctttgctgttatccttggtggtccttatctcatctggaaacttctgtctacacacagtgatgaagtaacagacaacatcaactgggcaaatggtgaggacgaccatgtagttgctagagcagagtatgattttaatgccgtgtctgatgaagaaatttctttccgtgctggggatatgctaaatctagctctcaaagaacaacagcccaaagtgcgtggttggcttctggctagtcttgatggtcaaacaacaggactgatacctgcaaattatgtcaaaattctgggtaaaagaagaggcagaaaaacaatagaatcgagtaaaatacccaagcagcaacaatcttttaccaacccaacgttaattaaaggagtcactactgccaactctttggatgaacaggaagctgcctttgaatctgtttttnnnnnnnnnnnnnnnnnnnnnnnnnnnnnnnnnnnnnnnnnnnnnnnnnnnnnnnnnnnnnnnnnnnnnnnnnnnnnatgtttgcttgcaggtgaataatactttagagtacttttaaaaattatttcttacagaaaaattaattnnnnnnnnnnnnnnnnnnnnnnntcatggccgtccaaggcattttgctgctaaaattatttagtcacactagtatgctggtctagtaatctggctacacttgaccatttattggaccatgaggacatttgtttcacctagctttagattatggagattgttgtcagtttcatcttatctaaatccctaagcttattggaacagtaaatttgatgaacactagaatacacaagttgcctcagaagggatcattaatgctttttaaagttctgagttaattgatttgaagtcttcaaaaattgagtgataacatctacttacaagaacaggcaaaaaggctgaatttttataatcctttaagtaaactaaataataaagattttttgatctgt

SEQ ID NO: 4251 - DNA, 600 bp, Mesocricetus auratus
gtcaaatggctgattctcgagaagcagaagccggacggtgtctttcaggaggatggacccgtgattcaccaagaaatgattggtggattccggaacgccaaagaggccgacgtgtccctcacagccttcgtcctcatcgcactgcaggaagccagggaaatctgtgaggggcagatcaacagccttcccgggagcattaacaaggcaggggagtacatcgaagccagttacctgaacctgcagagaccatacacggtggccattgctgcgtatgccctggccctgatgggaaaactggaggagccttacctcagcaagtttctgaaaacagccacagagcggaaccgctgggaggagcctggccagaagctctacaatgtggaggccacgtcctatgccctcctggccctgctgctgctgaaagacttcgactctgtgcctcctgtggtccgctggctcaatgagcagagatactacggaggcggctacggctccacacaggccaccttcatggtattccaagccttggcccaatatcaaacagacgtccccgaccacaaggacttgaacatggacgtgtccttccacctccccagccgc

SEQ ID NO: 4252 - DNA, 600 bp, Mesocricetus auratus
tggggtagcagctcctcagccagacggggcactgcctacagctcttccgtgggcatggggggagccaatggaggctccctgggcgaaggcagaacctttggtacaggagatgggggtccctatggcactgacatcggcccaggaggaggttatggggcagcagccggtggcatatatggcaccgatggcgactcattccgggctggcttcactggagacctggattacaacaagctggcagtgagggtgtctgagagcatgcagcgtcaaggcctactacaagggatggcctacaccgtccagggcccaccaggtgtgcctgggccccagggccctcctggcatcagcaaggttttctctgcctacagcaacgtgacacaggacctcatggacttcttccggacacatggagctattccaggcccacctgggcaaaagggagaggcgggcaccccaggacccaaaggtgacaggggccttgctggacaacgaggtcctcctgggccacctggccctcgagggcagaaaggagacaaaggagacaagggcgaccaagtctacactgggagaaggaggaggagtattgccatcaagccataa

SEQ ID NO: 4253 - DNA, 516 bp, Mesocricetus auratus; identical to SEQ ID NO: 611

SEQ ID NO: 4254 - DNA, 440 bp, Mesocricetus auratus; identical to SEQ ID NO: 612

SEQ ID NO: 4255 - DNA, 265 bp, Mesocricetus auratus; identical to SEQ ID NO: 613

SEQ ID NO: 4256 - DNA, 477 bp, Mesocricetus auratus; identical to SEQ ID NO: 614

SEQ ID NO: 4257 - DNA, 600 bp, Cricetulus griseus
ggtgggagagcggacggagggtggggccctggacctccagaagctgagaataggccagtccaacttcttcctcacagtgcccgtttccaggtccctggggcccctgggtggaggtggccagacatgggaaggcagtggagtgctgccctgcgtggggacacctgcagaacaggccctagaaaaggccttggccattctcaccctgcgccgtgccctgccaggggttgtccttcgactacagaaagccctgcaggactattacactctggtggaccgagtgccgggcctgctacaccacctggctagtatggactactcagccgtggtctctgaggaggacctcgtgacaaagctcaatgctggcttgcaggctgtatccgaggatcctaggctcctggtgagagccactggacccaaagaaagctcatctaggcctgagactgggcctaatgaccccccagaagccactcctgaggtacccaaggaagaagctgcccggagggccctagtagactctgtgtttcaggtatccgtgctgccaggaaatgtgggctacctgcgctttgacagatttgcagacgcctctgtgctgagggcact

SEQ ID NO: 4258 - DNA, 600 bp, Mesocricetus auratus
  misc_feature (59)..(59): n is a, c, g, or t
gtgaaggtatcatgtaatctgtaccacccaatcctttgcactctacagggtacactacncaacggaagtggatggaagtggagcagttccaatgtgctgaccttctataactgggagaggaacccctctattgctgctgaccgtggttattgtgcagttttgtctcagaaatcaggtaagacagagaagaaccacctgtgattaacccatcttcccacatccagtatgacaacctgggcatgacacaggtttgagacatacagtgtggacgtgtggtttgtcatcttctctcatggttgcctatatgtctccttgcaacagtgattatcatgcagaagagatgtcttaagtcaagagcagacactgagtcattctttgtttgagttcacagattcacctgccgcattccctttacctcctatctctctgtaggttttcagaagtggagagattttaattgtgaaaatgagcttccctatatctgcaaattcaaggtctagggcagttctaatttcaacagcttgaaaatattatgaagctcacacggacaaggaagcaagtatgaggattcactcaggaagagcaagctctgcctacaca

SEQ ID NO: 4259 - DNA, 1360 bp, Cricetulus longicaudatus
  misc_feature (794)..(794): n is a, c, g, or t
  misc_feature (844)..(844): n is a, c, g, or t
  misc_feature (851)..(851): n is a, c, g, or t
  misc_feature (1088)..(1088): n is a, c, g, or t
  misc_feature (1258)..(1258): n is a, c, g, or t
tgtacagcagcagtatttgtcaagtattcaacacctccttggagatggcctaacagagttagtcactgtcattaaacaagctgtacagaggattttaggaagtgtttctcttaaacattctttgtcccttttggacttggagcaaaaactaaaagaaattagaattcttgtggagcagcataggtctccttcttggattgataaagatgtatccaagtcttctctgtgccaatacatgatgccagatgaagaaacgccattagcagctcaggcctatgggctttctccaagagatattaccactattaaacttctcaatgagacaagagacatgttggaaagtccagattttagtacagttttgaatacctgtttaaacagaggcttcagtcggctactagacaacatggcagaattctttcggcccactgaacaggatctgcaacatggtaactccataaatagtctgtccagtgtcagcctgcctttagctaagataattcccatagtaaacggacagatccattcagtttgcagtgacacacctagtcattttgtgcaggatcttttgatgatggagcaagtaaaagactttgctgctaacgtgtacgaagcttttagtaccccccaacaactggagaaatgactttcttccttcaagaagagctaggatccatctacattaaaatcatctatacctagagtgacaattgcaaccaaaatgcctaataaaatatattcttaagcaaagtcttatttcataatgaagtagattcatttggcaccttattggnatttttaattcatcagcagtctacttcatcaggtgtatctaactggtgcncaaattncaacatcgggatcattcatgatctgtttcagcctggatagctgatccaaaccaagtagataattttatccatacatgtaatggaatgtgatgtcctttcacacatatctgtcttgaaaagtagatctaggatgtgtggactctgaagatatgtttaatcatgaagtttgctggactctgaagtgagagcaagccggattctctccagtcacgtgatttgtctcacacaccttgacanagggcttatcctctagaaatcagtgcattttgaaacctctgatcagctatttttttcctttgctatttttcttcaatatttatttgcagcattttctaaagctttcttagcaaccctcagaagttgcatatagaattatagtctaatgttatgttcatgttgtttactcncaattattaattacagagtttcatttgtgtataaataattttaataactttgtattgattttgagtacaacaaataacttgttgcaataaactattttcata

SEQ ID NO: 4260 - DNA, 1360 bp, Cricetulus longicaudatus
  misc_feature (337)..(354): n is a, c, g, or t
  misc_feature (397)..(418): n is a, c, g, or t
ttcttgccacctctggctatgtgttttgttaccgctgtgtgtttaattatgtgaggagtcatcaagcctgtcccatcacaggctatccgacagaagtccagcatctgattaaactctactctccagagaactgaaagaaattagcctattatcacacagctcaagttctgtactgtaaggccacaagactgctgtggtatggcaaacattgatacttccctaattcacaactacagtaattttcagtaactatggattcctttaaaagtatatagccactcggagcgttggtggcacccgtctttaatcccagcaccctggaagcagaagcaggctnnnnnnnnnnnnnnnnnnaccagtctggtctacagagcgagtgccaggataggctccaaannnnnnnnnnnnnnnnnnnnnngggggagggggagaaggatatagccacttgatcctaatgttttgatttgctctctagcaagctggttaagcaggagaattgggattgcaggtggtgtgagggccagtgtggaggtggattaaagaagaccactaagtgttgcttgtcctcaagagtggggttttcagctgaatgtggtcgtgtcatatctgcactcaggaagcaggattttgagttcaaggacagcttaggccaccatagggagcctgtcaaaaaagtaaaaagataaaagtaaaaagaaagtgagagactatgattaagagggataaaaagctcacaggaaaacccaggtcagaccttatacaacaggtggtttgagaaataggccttctctttaaaaaatatttctttacctgtgaagtgtagaggctttgtcagatggcatacactatgaaatgacttcctctttctagaaatatttagggacattttagagaaacaaccccttccatataccagacttactaacatttgattatcaaattaacaaatgctaattgtcagcatttggagattccttcatgagccatacctgtctctcttgggaaacaggttaaagaaaaatagggtttgttaatggggatgagtctggaaatttcaatgtgaatgaaagctagcaagcaatgatgagatgtacgaaaatacttatctaatgtttaccaaatgcttatctaatgaacatttaatgaggagcaaaagctttctacttgctcttatgagttttctcaattgacagtttgctcaattgacatgaatcacccagggtattatgaaagtttctatgaaacatttaagtaaattttaacaatacatgattctgggaaagaactgttcatgctggcacgattatgtggaaactcaaaagattactccaggggtttaaaataaattttcagatcacct

SEQ ID NO: 4261 - DNA, 882 bp, Mesocricetus auratus; identical to SEQ ID NO: 619

SEQ ID NO: 4262 - DNA, 600 bp, Mesocricetus auratus
  misc_feature (125)..(149): n is a, c, g, or t
gcaggtgtcacggccatgggtgcagcgttgagcccgggaggcatgggctccatgggcgcgcagcccgcagcctctatgaacggcctggggccctacgcggccgccatgaacccgtgcatgagccnnnnnnnnnnnnnnnnnnnnnnnnngggccgcagccgcgctgggggcggcggcgacgccaagacgttcaagcgcagctacccgcacgccaagccaccctactcctacatctcgctcatcaccatggccatccagcaggcgcccagcaagatgctcacgctgagcgagatctaccagtggatcatggacctcttcccctattaccgtcaaaaccagcagcgctggcagaactccatccgccactcgctgtctttcaacgactgtttcgtcaaggtggcgcgatccccggacaagcccggcaagggctcctactggacgctgcacccggactccggcaacatgttcgagaacggatgctacttgcgccgccaaaagcgcttcaagtgtgagaagcagccgggggccgtaggcggaagcgggggcaccggctccaagggtggccccgaaagtcgcaaggacccctcgggaacaggtaac

SEQ ID NO: 4263 - DNA, 521 bp, Mesocricetus auratus; identical to SEQ ID NO: 621

SEQ ID NO: 4264 - DNA, 600 bp, Mesocricetus auratus
  misc_feature (210)..(227): n is a, c, g, or t
ttaccccagagctttgctgcattggaacagggccgcctctcaaggttataccgtggctagaattaaacttggagactaccatttctatgggtttggcactgatgtggattacgagactgcttttattcattaccgactggcttcggagcaacaacacagtgcccaagctatgtttaacctgggctacatgcatgagaagggcctaggcannnnnnnnnnnnnnnnnnttgcaaaacgcttttatgacatggcagccgaggctagcccagatgcacaagttcctgtcttccttgcactctgcaaattgggtgtcgtctatttcttacagtacatacgggaagcaaatatccgagacatattcacccaactggatatggaccagcttctgggacccgagtgggacctttacctcatgaccatcatcgcgctcctgttgggtacggtcatagcttacagacagagacagcaccaggatgtgccggtacccaggcccccagggccatggccagctcctccccagcaggaaggaccaccagagcagcagccaccacagtagcagccacacacccgcctgggtccgtgacctctagggagctgctt

SEQ ID NO: 4265 - DNA, 355 bp, Cricetulus griseus; identical to SEQ ID NO: 623

SEQ ID NO: 4266 - DNA, 600 bp, Mesocricetus auratus
agcgagcgccagatcaagatctggttccagaaccgccgcatgaaatacaagaaagaccagaaggccaaagggctggcctcgtcgtccgggggtccctctccggccggcagccccccgcagcccatgcagtccacggctggcttcatgaacgccttacactccatgacccccagctatgacagcccgtccccgccagccttcggcaaaggccaccagaatgcctacgcgctgccttccaactaccagccccctcttaagggttgcggcgccccacagaagtgccccccaaccccggcgtcggagtatgagccccacgtcctccaagctaacgggggcgcctacgggacgcccaccatgcagggcagtccggtgtatgtgggcgggggtggctacgcggatccgctgccgccccctgccggcccctccctctacggcctcaatcacctttcccaccacccctcggggaacctggactacaacggggcggcccctatgggccccaaccagcatcatggaccctgtgaccctcaccccacatacacagacctctcctctcaccacgcaccgcctcagggtagaatccaagaagcgcccaactga

SEQ ID NO: 4267 - DNA, 1378 bp, Mesocricetus auratus
  misc_feature (386)..(410): n is a, c, g, or t
tgtttcaaagtagaagtcttttagggacgcttctagttggtgagttgctctgctgaggcgggtgtcacttgaccctctaaccgccatgctaattactccaggtgcctgagcagagaggacttaaaaccaaaatggatgttcagattgtttacagggggatacatttaactaatgtgaattttttttctctaagaatgcagttgctaaatagataggtgcatatcttaatagcgttttaacaacttcattgaaaattaaaattgtcaatactactatacgccacatcaaccctttagtttagatgagcattgggccaaatgcaaagttagtacctcaggcacaaactcaactacaagtcagatcgatgatgtttcaaaataggcttnnnnnnnnnnnnnnnnnnnnnnnnnaggcatgctttttacacagaaaatggggcctcctggaagatgtttcttatattatttcaaagatatctataccaatattaattagttgtaatgttttctatttatatacttgtattcagtggggttttttttatcttttgaggaaacagagtttaatgtttcgtaaagtgtggggttgcgactgttaaattgactaggcgtgttgtatcagcatgtcttctgtttgatgattttcttttttacaaggacccaactacagatgagatttaaacttttacagtttttatatttcacacagcacatcaacttttgatgaatgttattttgtaacctttttagcaaagcaaaacataaaagcagtctttgaatggtggtgtttgctaactttgtatttgtaaaatgaaagcttctaagaccttgaaacttgaaactttgtcattaatgtagaaatatttaaaatctaaatgactaggggaacattattttgtggatgtaatttccattttaagacccagaatatattcttataagtcgtgtccactaaataggatgacacttttattcagtgtttaattcatatttatattttagaatatttttgtacaagatacagatttattttgtttgaggtgtttatactatcataaagttgtaaataattttctaagactgttttaatatggtccacaaatgtcctaaatatttttattgaggcatcttagaaataaccattcagtttcttcaaagacctaaacgaatgcattgtgaccacagctgtgtatatggctgatgccatggtaaagttatcttgccttttaaaagtggtggagttgatcagtgcatgcaaaagcatctctgaattgattgtataccatgcctaatatgacgagaaagtgcccagctgttgcaaggtgaggtgttaaagattctgcaagcactgtctagagaataaattcctgtatctctga

SEQ ID NO: 4268 - DNA, 600 bp, Cricetulus griseus
actcctggtgaagaaggggcgagtggggcaggactgggtcccagcaagcgtgtcttgggatccctgttgtctgactccctgtttcttgaagtgaaagagctcttcctggcagctgtgcgtctggaccctacatccattgaccctgacgtgcagtgtggcttgggagtcctcttcaacctgagtggggagtacgacaaggctgtggactgttttacggctgccctcagtgttcgtcccaatgactatttgttgtggaacaaacttggggccacactggccaacgggaaccagagtgaagaggcagtggctgcgtaccgtagagcccttgaactacagcctgggtatatccggtcccgctataacctaggcatcagctgcatcaacctcggggctcaccgtgaggctgtggaacactttctggaggccctgaacatgcagaggaagagccggggccctcggggtgaggggggcgccatgtcagagaacatctggagtaccctgcggttggccttgtctatgttaggccagagtgacgcctatggggcagctgatgctcgggatctgtctgccctcctagctatgtttggcctgccccagtga

SEQ ID NO: 4269 - DNA, 1400 bp, Cricetulus griseus
tagcagttatgtttgagtcccacacagccaatgaagatctgcctgacagcaatccttggacgctccagaaggaaactgggccatacctcctcaactgcactggatccaacttactctgtttcaactgacacttggagcagagctgtactgacttcaatcaagttgaggatttcaacctagatcttcaatcaagcaaatcccatctaacatggactggatataatccattcaagactttcaccatactaacattttcttcccacaagactccacgaggctacccccatcccatttcaacaggaagtaagttggaggatgctatgcccccgtcccccattattgtctattagggtagtataagcctagttgaggataacttactattgtttagggttgtgattggaaggagatgttcaggtttggatacctctttcagatgactttagggtttagctgaaatagacatggttaggatgtgcaatagcggattattatatcttcttgtatttcacttttatgattggtaattttggatactttacactattaagttttaatcctcttttagactaacaggggaattgtagggggacactgtaaccacacctcctaagggctggccacaggtgtgcatattgggtttttaagggggacccccttctctctggcctggctgcctttctgcctctagcacactctggcttgcatttgactgatatctgaataaagatatcttaaccttaaagaccacagaatcatcagctcttataataacagccagtaagtgtttcaaatatgaaaattaaaatacatacatgcttcaagaaaatcttgctacaaaacaaagcaaatcctcaaacattaaggaaagctctatcaggttcagcatgatcacaaattcaagaagaaattccaagcacccattccgatttgaggacagcccttgttccttattcaattaaaaagacactgcagggaacagtggcaatacacagctttcctctctcttacatacatgtggttaagtcctaggagcccaacatcaaggctaccagtctggctggactcctgggactcattgtgactatgatttgtctattggaattatccatgtgatcacagaggtaacacaatctcttgcttgcttttagaattttcaaaggatgaaatgaagacagatgtcttcaaaattccaaagtaagccttaggtttctttgtcccccaccccttttaaaatagtgttaaggatcaaactcagagttacacacagactagacatatgctacaacattaacctatatgcctagactccaagttttgttttttcttaacagaaacatataatcattagtaatcaacactagcaacatggaagaggtttatggaataaaaaataataa

SEQ ID NO: 4270 - DNA, 600 bp, Cricetulus griseus
gtctaaggctatattagcttctaagtctttgtactttggggtggggttataggcaatagagatggttccttttacctgcttcagactctgaaaagattggaacggaggaatgaggccgctgctttttggagggaggcccaaaatcaaccactacaggaagaagccacttggtaaggtttagtcttcctggcttggggctggggggcaattggaatcctgtagtgggggtgatgaggaacagaaggaaggaaggatgtcaaatctatgtctgtctttcattcttaggcatcaccattcttccttttcaggtctcttccactgtacttagaaacctgtttgagctggatccatccccctaactgtgaagctctccttaaggagtttggaacatctctgctataagtctcgtgattattagcttccttgtttccaggagcttgagctggggctcctgtggaccatctccatggggagggtttttttctgccttgtcctctttggataatatggctggagctgattgttcctaagtcactcctccactgatatgaggttggtggtcttgtgaaccttggtctacttattgccagtctagttcca

SEQ ID NO: 4271 - DNA, 381 bp, Cricetinae gen. sp.; identical to SEQ ID NO: 629

SEQ ID NO: 4272 - DNA, 417 bp, Cricetinae gen. sp.; identical to SEQ ID NO: 630

SEQ ID NO: 4273 - DNA, 600 bp, Cricetulus griseus
gtcagatctcttgcttgtgatgtcaaacctctatagccttaatgcaggatctttgaccatgagtgaaaagcgggagtttcctacagtacccttggttaaattaggaagttcctttaccaaggttcaagattacctaaggaggtttgaaagtatacctgacatgctggaattggatcacctcactgtttctggagatgtgacatttggaaaaaatgtttcattaaagggaacagttatcattattgcaaatcatggtgacagaattgacatcccccctggagcagtgttagagaacaagatcgtatctggaaatcttcgaatcttggatcactaagataagcgctgccggatacactttatactaattatgggttaaacagtttcttgtaataaaatgtcctctaagattctcaaatgagcaagtacttttactgtgcagtgttgattttttagagttttctgcaatgtgcttttagcctaaagagaagatagatggagcagtactgtccttttttgatgaagagcctagagatgagttcatctaaaagtgcaatattatttaatcgtagaactgggccagctcggcaatcttttaacaga

SEQ ID NO: 4274 - DNA, 1080 bp, Mesocricetus auratus
gccgccgcctctaccgccgcgacggtccgggccgcggtcgcccagggactttgaatatgtcggggattgccctcagccgacttgcccaggaaaggaaagcttggaggaaggaccacccttttggctttgtggctgtcccaacaaagaaccctgatggcacgatgaacctgatgaattgggagtgcgctattcctggcaagaaggggactccatgggaaggaggcttgttcaaactacggatgcttttcaaagatgactatccgtcctcaccaccaaaatgtaaatttgagccaccactgtttcacccaaatgtgtatccttctggcacagtgtgcctgtccatcctggaagaagacaaggactggaggccagccatcacgatcaaccagctctttataggaatacaggaacttcttaatgaaccaaatatccaagaaccagctcaagcagaggcctacacaatttactgccaaaacagagtggaatatgagaaaaggttccgagcacaagcgaagaagttttgcccctcctaagcagcggcacttgttgctcccatgacggaggaagggattggcttggcaagaacttgtttacaaacttttgcatatctaagtcgctgcgtacaagttactagtcacctgggagggttgagcgggcgccattttccatttctgccactggcatttacagtctcaattcgctgaattgccccagttttcatacagggtctcttccttcagtcttttgtatttttgattgttatgtaaaacttgcttttattttaatattgatgtcagtatttcaactgctgtaaaatgataaacttttgtacttggtaagcccctaggagctagtttcttcgcgctcggatgcaggcatgcttcccactgttctctggcctccagctggctgtatgacagatccacactgtccctctctccccatcctcgtcctcctcagaaacctgggctgttgcttatgagcctcagatccaaagttggccagcgtctccattctgcacctcttcctttgtgtttatatggcgttttgtctgtgttgctgtttagagtgaataaactg

SEQ ID NO: 4275 - DNA, 567 bp, Cricetulus griseus
tcaggagacgcctgaaggaaatgggattcatcatctatggcaatgaagattccccggtggtgcctttgatgctctacatgccagccaaaattggcgcctttgggcgggagatgctgaagcggaacgttggtgtggttgtggtgggatttcctgctaccccaatcattgagtccagagccagattttgcctgtcagcagctcataccaaagaaatacttgacacggctttaaaggagatagatgaagttggagacctgctgcagctgaagtactcacgccgtcggctggtgcctctgttggacaggccctttgatgagactacctatgaggagacagaagactgagcctttttggtgctccctagaggaggaaactccctcccaggacagtgtgtggcctttctgagccagttccagaaccacacttcagtgaccacctcatgtgaaagacatttccgaagctactgaaggtggacacctccactccaaatggcattttgtaaatagtaaaaaaagaaacaaactgcttcacattcttccattgtttgctaagtctcacctttatata

SEQ ID NO: 4276 - DNA, 1367 bp, Cricetulus griseus
  misc_feature (1309)..(1328): n is a, c, g, or t
acttggacaaggaagagaagtgccttcctcctccaagcatcagggttgtggtcacggtggagcagacagaggaagagctggagagggctgcgtccaccatcagggaggctgcccaggctgtgctgctgtagggtgcagcccggtgtttcctgccacatcacctgcgggcagaactgctcagactcctccagctgcccacggagtggattgctgcccgccatgcagctgtgacttgagttcacagacataactaatgaatggattttttttataaaggcaggagctgactttagaagaacacagatgacagcatataactgctatttactttgtgccattgggtctgtttggatgctttactatctgtcatttatattcatttttgtttcaaactggagcttcagttttcttctcccatctgtggtaatgatccaataagcactccttcgtattttgtagaaaaggacttagcagctaagaggagctctcgtgtaccacagttaactgtggcagagggagtcaactgcatcttcccagtccctcaggtagagctcaatggtggctgctatgcggagagcactttctgagagttagaaaattcatatagcatattggaatcctagagccttatatgcactagttattattgatgttgtcatttctaatgtgagcttctcttaatagaaaaatattcatactgcttcctaagcaataatatgaatcaaacattattttatttttgtgtaattgactttatatttttatatattctctagtcggttttgtgaagagggttattattctggtccccaaatacagatcatgccctgggtatttttgaatttgtcagatgtcctttttcatggtggttttgtttgggagcatagaactgtgggctttttctaagctgagaaaagtgagaacttttttcatcctgtaaattgctgatgcctcagaaaaacaggatgctctgaaagtgaccttcgagctgtacactggctgctgttctccttggtgagcatgctgagcagtgtaaggcttgcgatacttgccatggagcatgtacatagaaggaaggccgccattccttctcgtgtgcatgggcagagaatcgggtcgctaaaggtcgattccttctcgtgtgcataggcagagaatcgggtcgctaaaggtcgttttatgatgtgcattcatgttacagtgaccggcatcttttgaagtgatctgtgacatttttaatgtttctatttcatacgtgccttgtgattgctgctgctgtgagggctatggtcctgttggggatgggtcnnnnnnnnnnnnnnnnnnnntgaaataaacctccaggagcccacattcctgaaaaagaa

SEQ ID NO: 4277 - DNA, 719 bp, Mesocricetus auratus
  misc_feature (50)..(66): n is a, c, g, or t
gggagccctggctatatcaacttaagctatgagaagtcacattctcaggnnnnnnnnnnnnnnnnnactgcattagtgcttacccctttgaagtggtaccagagcatgataaggcagccgtatccttcctatggttacgaacccatgggtggatggctgcaccaccaaatcatccctgtgctgtctcaacagcatccccagagtcacacccttcagcctcatcaccacctcccagtggtgccagctcaacagccagtggccccccagcaaccaatgatgccagttcctggccaccactccatgactccaacccaacaccatcagccaaacatccctccatccgcccagcagcccttccagcagcccttccagccccagcccatttcaccccagtctcatcagcccatgcagccccagtcacctctgcaccccatgcagcccctggcaccacagccacctctgcctccactgttctccatgcagcccctgtcccccattcttcctgagctgcctctggaagcttggccagcgacagacaagaccaagcgggaagaagtggattaaaaaattcagaaaatgagagaaccgaagtggatacttcggttgtttttaggaataactcaagaacacaatgatttgtgcctacaatcacttagtaaattctgtaactaaaaataagtatcattagcagataataaaatgttttaaaaatcaaaaaa

SEQ ID NO: 4278 - DNA, 1400 bp, Mesocricetus auratus
  misc_feature (431)..(464): n is a, c, g, or t
gtatgttggctcaggagaaagagctgcaggaggtcaggaccttgttcaggtccttcaccccgaaacacagagaggaattatccaagctgcagacaaagaccaaggtgacagtgctggagggagacattctggatgcccagtgcctgaggagagcctgccagggcatctccgttgtcatccacactgctgccgccattgacgtctttggtgccattcccagacagactgtcatagatatcaacctgaaaggtactcagcacctgttggatgcttgtataggagcccgtgtgcccgtcttcatctacagcagctcagtggctgtggctggaccgaactcctacaaagtgatcatccagaatggctctgaggaagaaaatcatgaaagcacatggtctgatccatacgcatacagcaaaaagatggctgagaannnnnnnnnnnnnnnnnnnnnnnnnnnnnnnnnngatggtggcactttgcatacttgtgccttaagactcccattcatctatggggaaaaaagcaaattcatttcagatacaatggatagagcactgaagaacaatggtctaattaacggttttagcagattctctgtgatcagctcagtgtatgtgaataatgcagcctgggcacacgtcctggctgccaggggcctacaagaccccaagaagtcaccaaacatccaaggacagttctactacatctcagatgacacccctcaccaaagctatgatgatttatgttacactctgagcaaggactggggcctccgccctgattccagttggaaacctcctgtggccctgctgtactggtttggcttcctgctggaaactgtgagcttcctgctgcgtccggtctacaactaccagcctccctttaatcgccacttggtcacactcttaaatagtgtgttcaccttctcctacaagaaagctcagcgagatctgggctatgagccccttgtcagctgggaggaagccagggagaaaacttcagagtggatcgggtcactggtggagcagcacaagggaacactgaacataaaggctcagtgatgtgaagatggaggggacatgtcctgggtgctctcagctccttcagaaagggtctaagacacaatccaagtctttgacatactggccaacttgttttcagtcaccagaagccttgccagtcactggcccagctacaaaccttctgccctaaaaacctgcccagcaacatacaggctgtgcctcagctgctataaccaaaggctcagttgtagtgctgaactgcccagagcctcctgtaccttagaattgcatcagagcttccaattcccctcttgtctgagaaaatttccattgcttcatgaatctcaaggaaaagtacaataaaatcgtttaatgcct

SEQ ID NO: 4279 - DNA, 600 bp, Cricetulus griseus
gtttgcatacgtgtctacctgcccggaaagcagttgaagctactcaagtttgtagaaccaataaagattgcaaaaccagctcaagttcaagtttctgtatagtaccatcgttggaaactcatactcgattaataaaagtgaaacatccacctcaaattgatatgctgtatgtagggcacccactacatcttcactacacagtgagcatcacaagttttattccacgcttcaactttctaagcatagatctgccagttattgtggagacatttgtcaagtatctgatttctctttccggagctctggctatcgttaatgcagtgccctgctttgccctggatggtcaatggattttaaactctttcctggatgctacccttacctcagtgattggagacaatgatgtcaaagatctgataggatttttcatcttgcttggtggcagtgtacttttggctgccaatgtgacactgggactctggatggttacagcacggtaatatttgttctcatccaacagaaaatatggagtacaactatgtgggagtatcatttgctgttgaaattcctactaggtatgaagtgtaaagtgtttcctta

SEQ ID NO: 4280 - DNA, 275 bp, Mesocricetus auratus; identical to SEQ ID NO: 638

SEQ ID NO: 4281 - DNA, 523 bp, Mesocricetus auratus; identical to SEQ ID NO: 639
  misc_feature (27)..(27): n is a, c, g, or t
  misc_feature (348)..(348): n is a, c, g, or t
  misc_feature (395)..(395): n is a, c, g, or t

SEQ ID NO: 4282 - DNA, 600 bp, Mesocricetus auratus
  misc_feature (422)..(422): n is a, c, g, or t
cttctgtttgcagctcagagcattatgtgtgctcacactacgggaccccctcgataatttttaaaataatgcgtgttgggggcagaggaagtgagaaacaaaattaataccaaaatcatcaacactgtaaatgaataaggcataaaacataacataatatgtcacgttgccctaattttattcctggagtgtgagttttcatctcagtacactttaagtacaattatttacctgttatatacatatatatatatattcatgttcatttttggtccattcagtgctgaaatattgtatgttacatatgatagttcatgtctttgatagtggtacaattgttagactgtgcaacacacaaacatttcttaaattttgaagcagtactaaatcatgaatttcagaaattaattcctaagcctttnttgaatgtaaagcataaaaatacaaatcctcattttatacataggtttatagcaatagactgaaaccctgagtctatatcataattattactgatcctttggaagttttacatcatgtaccccaattctgctcacctcccaggtcctccatatctgccctcacccctgaagtgtccgt

SEQ ID NO: 4283 - DNA, 600 bp, Mesocricetus auratus
ggttcctcataacgccagaatttgtgatgacggctgcacactgcaaaggaaaagaaattactgtcacccttggagctcatgatgtgagcaaggcagaatccacacagcagaagataaaagtcaaaaaacaaatcgctcacccaaactacagcttctactccaaactgcatgacatcatgttcttaaagcttcaaaagaaagctaaagaagacccctctgtggacacaatccccctgcctagtccgtctgactttcttaaacctgggaaaatgtgccgggcagctggctggggaaggactggagtgacagaaccgacgtcagaaaggctgagggaggtcaaactgagaatcatggacaaaggggcctgtaaaaactattaccactatcattatgacttccaggtctgcgtgggcagccccagaagggtcagatcagcatacaagggagactccgggggacctcttctgtgtgctggggtggcccatggtattgtatcttatggacgtggagatgcaaagccccctgcagtcttcacccgaatctcctcatacgtgccctggattaatatagtcataaaggcaagcagttgaagagccagcc

SEQ ID NO: 4284 - DNA, 600 bp, Mesocricetus auratus
cattctaaaggcctctgtggactacatccgaaagttgcaacgagaacagcagcgtgcaaaggaccttgaaaaccgacagaagaagctggaacatgctaaccggcatctgttgctcagagtacaggagcttgagatgcaggcgagagcgcatggactttcccttatcccatcctctggcctctgctcgcctgatctggtgaaccggatcatcaagcaagaaccagttcttgagaactgcagccaggaacttgtgcagcaccagacagacctgacatgtacaacgaccctggatctcacggacggtaccatcaccttcacaaacaacctcggcaccatgccagagagcaaccccgcctatagcatccccaggaaaatgggctccaacttggaagacatcttgatggacgatgccctctcgcctgttggcgtcactgatccactgctgtcatcagtgtccccaggagcttctaagacaagcagccggaggagcagtatgagcgcagaagaaacggagcatgcatgttagcgagcccaccttgctctgcctctgcacaaactgcttcctctcttcttcagtagacttcataatttacctgaaga

SEQ ID NO: 4285 - DNA, 217 bp, Cricetulus griseus; identical to SEQ ID NO: 643

SEQ ID NO: 4286 - DNA, 222 bp, Cricetulus griseus; identical to SEQ ID NO: 644

SEQ ID NO: 4287 - DNA, 260 bp, Cricetulus griseus; identical to SEQ ID NO: 645

SEQ ID NO: 4288 - DNA, 192 bp, Cricetulus griseus; identical to SEQ ID NO: 646

SEQ ID NO: 4289 - DNA, 179 bp, Cricetulus griseus
ccggcagcgctgtgtcaacaccaagggcggctttgaatgtctctgctatgatggctttgagttggtggatggagagtgcgtggagctcctggatccgtgctacggatctgactgcgaatatcagtgccagccagtgagtcccagagagtacatttgcatctgtgcttgagggcttcgca

SEQ ID NO: 4290 - DNA, 600 bp, Cricetulus griseus
  misc_feature (207)..(306): n is a, c, g, or t
  misc_feature (365)..(434): n is a, c, g, or t
ggttattgtcgtacaagcatgaagacctgagctcgaagcctggcacccatgtaaaaagaaaccatgcatggtagtgtgcatcttcaatcccagcattggggagacagagaaagagaaagggacatccctagagcttcctggtcagccagccttggcaagccagtgaactccaggttcagtgagagacctgtctggggaggaaaaagnnnnnnnnnnnnnnnnnnnnnnnnnnnnnnnnnnnnnnnnnnnnnnnnnnnnnnnnnnnnnnnnnnnnnnnnnnnnnnnnnnnnnnnnnnnnnnnnnnnntgaggaagatacctgatatcaacctcacacactcatgtacccatgtatgtaggtacctnnnnnnnnnnnnnnnnnnnnnnnnnnnnnnnnnnnnnnnnnnnnnnnnnnnnnnnnnnnnnnnnnnnnnngatggtgttgaattctaaggctcttatccacacatatatggagacaaatagaagaattacagtcgtccctgcctttgacgctactctgtttctccaaccctgcttcccagatatttttcaacatctactcagccttgagtggttgcactctgaccccaggacctct

SEQ ID NO: 4291 - DNA, 240 bp, Cricetulus griseus; identical to SEQ ID NO: 649

SEQ ID NO: 4292 - DNA, 172 bp, Cricetinae gen. sp.; identical to SEQ ID NO: 650

SEQ ID NO: 4293 - DNA, 272 bp, Mesocricetus auratus; identical to SEQ ID NO: 651

SEQ ID NO: 4294 - DNA, 600 bp, Cricetulus griseus
gggcttcagccaggcctcgcatctcctggcacatcagagaggccacactggggagaaaccctacaagtgtggcacgtgcggaaagggattcagccggagttcagatcttaatgtccattgtcgaatccacacgggagagaaaccctacaaatgtgagaggtgcgggaaggccttcagtcgagtgtcaattctccaagtgcatcagagggtccacagtgacgagaaaccctatcagtgtgacgcgtgtgggaagggcttcaccgtggagtcacaccttcaggctcaccagaggtcccacactggagaaagaccctatcggtgcgaggagtgtggcagaggcttctgcagagcttccaactttctagcccaccgtggagtccacactggagagaaaccctaccgatgtgacctgtgtggcaaacgcttccgccagaggtcctacctccacgaccaccaccgggttcacactggcgagaaaccgtacaagtgtggggagtgtggcaaggtcttcagctggagctcctacctcaaagcccaccagagggttcacactgggcagaaaccttaccgatgtgaggcgtgcggcaaagggttcagctg

SEQ ID NO: 4295 - DNA, 600 bp, Cricetulus griseus
  misc_feature (225)..(244): n is a, c, g, or t
attgccaatctgctcaaagagaaggagaaactggagttcattttggcagcccaccgacctgcttgcaagatcccggatgacctgggcttcccagaagagatgtctgtggcttccctggatttgactgggggtctgcctgaggccactaccccagagtccgaggaggccttctcactgcctcttctcaatgacgctgagcccaagacatcactggagccagtcaannnnnnnnnnnnnnnnnnnntgaaggctgagccctttgatgacttcttgttcccaccatcatccaggcccagtggctctgagacgacggccagatctgtgccagacatggacctatccggttccttctacgcagcagactgggagcctctgcacagtagctccctggggatggggcccatggtcacagagctggagcccctgtgtaccccggtggtcacctgtactcccagctgcacaacttacacgtcttcctttgtcttcacctaccccgaggctgactccttccccagctgtgcagctgcccaccgaaagggcagcagcagcaacgagccctcctctgactcactgagctcacccacactgctagccctgtga

SEQ ID NO: 4296 - DNA, 90 bp, Cricetulus griseus; identical to SEQ ID NO: 654

SEQ ID NO: 4297 - DNA, 600 bp, Cricetulus griseus
cctcaggccaaagccaagacccaagcagcaggacccagctcgccccagagaccacccactccaaaagagaccaaatcgccctcaccagaaccccaggacaatagtgacactgaaggggaacagtcagaaggacaggacaatggggcggaagattccggagacaccgaggatgagctgaggagggtagccgagcagagggagcagaggcagcccccagctccaggggagaatggtgaggacccatatgctggctccacagacgagaacacagacaacgaggcttccacagaggctgacctgccaattccagagctcccagacttcttccagggcaaacacttcttcctgtacggggagttccctggggacgagaggaggaagcttatccgatacgttacagctttcaatggtgaacttgaggactacatgagcgagcgggtccaattcgttatcacagcccaggagtgggaccccatctttgaggaggccctgatggagaacccttccctggccttcgtccggccccggtggatctacagttgtaatgagaagcagaagttactcccccaccagctctatggagtggtgccacaggcctga

SEQ ID NO: 4298 - DNA, 600 bp, Mesocricetus auratus
ttttaactcaagtagcttagatgtcgtgaatggaggggacctcgtctttaatatcttgacgaactggcaaaaggctggtgacacaaaaatcattgagagccagatcgtctccttctacttcaaactctttgaagccttgaaggacaaccaggccatccagaggagcatagacaccatcaaggcagacctgtttgctaacttcttcaacagcagcatggagaaactcaatgactttgtgaagctcaccaagattccggtaaatgaccttcaggttcagcggaaagctgtcaatgaactcatcagtgtgatgcctcacctgtcacgaaaacttagcctaaggaaacggaaaagaagtcggtgctgttttgggggtggaaatcgtcccaacaagaatattcttgccagcaatatttgaatttaaaacttaaacctatttattaatatttaacattatttatatggaaatttatatttttagaataaccaaccaaagaagtatttatgatagcaacttttctgtgatgaaaatgaatttctattaatatatatatgttatttataatttctgtatcctcaactatctcacctgaccatttattg

SEQ ID NO: 4299 - DNA, 80 bp, Cricetulus longicaudatus; identical to SEQ ID NO: 657

SEQ ID NO: 4300 - DNA, 1349 bp, Cricetulus griseus
  misc_feature (814)..(841): n is a, c, g, or t
atgggaaatgaagcctacaagaagaaagacttcgacatggccttgaagcattatgacagggccaaggagctagaccccaccaatatgacttacataactaatcaagcagctgtgcactttgagaaaggtgactacaacaaatgccgggagctgtgtgagaaggcgattgaggtgggcagagagaaccgagaggactaccgacagattgccaaagcttatgccagaatcggcaattcctatttcaaagaagaaaggtacaaggatgctatccatttctacaataagtctctggcagagcacagaactccagatgtgctcaagaagtgccagcaggcagagaaaatcctgaaggagcaagagcgactggcctatatcaaccctgacttggctttggaggagaagaacaagggcaatgaatgcttccagaaaggggactacccccaagccatgaagcactatacagaagccattaaacggaacccaaaagatgccaaactgtatagtaaccgagctgcctgctacaccaagctcctggagtttcagctggcactcaaggactgtgaggagtgcatccagctggagccaacctttatcaagggttacacacggaaagcagccgccttggaagccatgaaggactatacaaaagctatggatgtgtaccagaaggcgctagaactggactccagctgtaaggaggcagcagatggttaccagcgctgtatgatggcacagtacaacagacatgatagccctgaggatgtgaagcgacgggccatggctgaccctgaggtgcagcagattatgagtgacnnnnnnnnnnnnnnnnnnnnnnnnnnnntgcaaaaggatccccaggctctgagcgaacacttaaagaaccccgtaatagcacagaagatccagaagctgatggatgtgggtctgattgcaattcggtgataacttgcttttcccctcttcccttcgccaatgtggaaaggcgagctgggacggtggcgagcagcactgggcagagggggggggaagaaaggcttatctttatatttatacatgcctgcaaggaagacagactcatccagcgccacctcggaccctctcagcacacgcatggtctcttcactgctgcccttgagtgtccttccctgtcctacccaaacacccccacccccctgccccacccccgtcactgtctcggctgctcccctatagttggttattttttatttggggcagtgggttcatacggggaggggagggaattcttccctacctggggtcccagctgtcttcacttgttgttaccccacgtccttcaataaaacaagccagtcaggcgtggttatatg

SEQ ID NO: 4301 - DNA, 600 bp, Cricetulus griseus
  misc_feature (328)..(345): n is a, c, g, or t
aaattaagagttatgtgaattatgtgctaagtgaaaaatcatcaacctttctaatgaaggcagcggcaaaagtagtagaaagcaaaaggacaagaacaataacttctcaagataaacctagtggtaatgatgttgaaatggaaactgaagctaatttggatacaagaaaaagtgttagtgacaaacagtctgcggtaactgaatcctcagagggtacagtatccttattgaggtctcacaagaatcttttcttatctaagttgcaacatggaacccagcaacaagaccttaataagaaagaaagaagagtaggaactcctcaaagtannnnnnnnnnnnnnnnnngcagaagagccactgaaagcagaatacctgtttcaaagagtcagccggtaactcctgaaaaacatcgagctagaaaaagacaggcatggctttgggaagaagacaagaatttgagatctggcgtgaggaaatatggagagggaaactggtctaaaatactgttgcattataaattcaacaaccggacaagtgtcatgttaaaagacagatggaggaccatgaagaaactaaaactgatttcctcagacagcgaag

SEQ ID NO: 4302 - DNA, 392 bp, Mesocricetus auratus; identical to SEQ ID NO: 660

SEQ ID NO: 4303 - DNA, 399 bp, Mesocricetus auratus; identical to SEQ ID NO: 661

SEQ ID NO: 4304 - DNA, 416 bp, Mesocricetus auratus; identical to SEQ ID NO: 662

SEQ ID NO: 4305 - DNA, 1377 bp, Cricetulus griseus
ggaagagccggacagctacacggaatgtacagatggctatgagtgggacgcagacagccagcactgccgggatgtcaacgagtgcctgaccatccccgaggcctgcaagggcgaaatgaaatgcatcaaccactatgggggctatttgtgtctgcctcgatctgcggctgtcattaatgatctacatggcgaaggccctccaccaccagtgccccctgctcaacaccccaatccttgcccaccaggctatgaacctgatgaacaggagagctgtgtggatgtggacgagtgcgcccaggctttgcatgactgtcgccctagccaagactgtcataacctgcctggttcctaccaatgcacctgccctgatggttaccgaaaagttgggcccgaatgcgtggacatagacgagtgtcgctaccgatattgccagcatcgatgtgtgaacctgccaggctcttttcgctgccagtgtgagccaggattccagctgggtcctaacaaccgttcttgtgtggatgtgaatgagtgtgacatgggagccccatgtgagcaacgctgcttcaactcctatgggaccttcttgtgtcgttgtaaccaaggctatgaactgcaccgggatggcttctcctgcagtgatatcgatgagtgcagctactccagttacctctgccagtatcgctgtgtcaatgagccgggccgcttctcctgtcactgcccacaaggctaccagctgctggccacaaggctctgccaagacattgacgagtgtgaaacaggtgcacaccagtgttctgaggcccaaacctgtgtgaacttccatgggggctaccgctgtgtggacaccaaccgttgcgtggaaccctatgtccaagtgtcggacaaccgctgcttctgccctgtctcgaaccccctgtgtcgagagcaaccttcatccattgtgcaccgctacatgagcatcacctcagagcgaagtgtgcctgcagacgtgtttcagatccaggcaacctccgtctaccctggcgcctacaatgcctttcagatccgtgctggaaacacgcagggggacttctacattaggcaaatcaacaatgtcagtgccatgctggtccttgccaggccagtgacaggaccccgggagtatgtgctggacctggagatggtcaccatgaactctcttatgagctatcgggccagctctgtactgagactcaccgtctttgtgggagcctacaccttctgaaggagaccctcagggaagggctgggtggggcccccctctttctccctctcatagcttaaggagcctggggttgaggagtgactgttctgcttaaagagacaatgatgtgaaggacaataaagggagaaaggagg

SEQ ID NO: 4306 - DNA, 903 bp, Mesocricetus auratus
actcagagactattggagaactccagggaggtcacccacaccgttcaggatgaaaactgtagtgctggccgtggctgtgctcttcctgaccggaagccaggctcggcacttctggcagcgagatgacccccagaccccatgggacagagtgaaggatttcgccactgtgtatgtggatgcggtgaaagacagcggcagagaatatgtgtctcagtttgaaacctccgccctgggcaagcagctgaacctgaatctcctggagaactgggacaccctgggctcaaccgttggtcgcctgcaggaacagctgggcccagtgactcaggagttctgggataacctggaaaaggagacagaatggctgaggcgggagatgaacaaggacctggaggaggtgaaggcgaaggtgcagccctatctggaccaattccagaccaagtggcaggaggaagtggctctttaccgccagaagatggagcctctgggcgccgagctgcgcgatggtgcgcgccagaagctgcaggagctgcaggagaagctaacccctctgggcgaggatcttcgtgaccgcatgcgccaccacgttgacgctctgcgcacaaagatgacgccctacagcgaccaaatgcgcgaccgcctggctgagcgcctggcccaactcaaggacagccccaccctggctgagtaccacaccaaggccgctgaccatctgaaggcgttcggcgagaaggccaaacccgctctggaggacctgcgccagggcctgatgcccgtgtttgagagctttaagaccagaataatgagtatggtcgaggaagccagcaagaagctgaatgcccagtgaggctcccatcttcataccccacccctacattggctttcttagaataaacctttccaaag

SEQ ID NO: 4307 - DNA, 171 bp, Mesocricetus auratus; identical to SEQ ID NO: 665

SEQ ID NO: 4308 - DNA, 600 bp, Cricetulus griseus
  misc_feature (187)..(187): n is a, c, g, or t
  misc_feature (197)..(197): n is a, c, g, or t
  misc_feature (307)..(307): n is a, c, g, or t
gtcctccattgtgtttgttattcgtggatcctgaatgatcatgatctgcagcttagtccttgaggttctaatggctttcccaccaactccacctttcacacaacacagcccaagtttctcattgtgtccagcccctgcccccgcttcttttggacaagagttggattaaagcaaaccaccttggcancttttgtaanccccaatagcagtttcggacagcactgaccagtaggcatggtgcccggagcccaagctgaggacctgcctgccttgctctcatttcgcttacgatagagcattttccctncagcaactaataacgtttatttggtttggaaacttaggtttcctaatccacaagagacagactgtccagaaatgctgggtggtcctcagcgtgtccaattccaacagcttcagaccagcacgtcagcccagcaactgcctcagctggagcctttccatggatgctttcctgtggagagccatccgccacatgtccacaaaggaggctgattcagtgagccatgcagactgatgctccacaccctgcaccctcccagcttgaacagttccccacatggctgtgtggccttttag

SEQ ID NO: 4309 - DNA, 138 bp, Mesocricetus auratus; identical to SEQ ID NO: 667

SEQ ID NO: 4310 - DNA, 131 bp, Mesocricetus auratus
  misc_feature (78)..(78): n is a, c, g, or t
tgttgccacaagggttcaaaaatagccccaccctctttgatgaggccttacatcaggacttggccggatttagagtcnaccaccctgaggtcctcctcttacaatccatggatgacctcctgctggcctcc

SEQ ID NO: 4311 - DNA, 138 bp, Mesocricetus auratus; identical to SEQ ID NO: 669

SEQ ID NO: 4312 - DNA, 110 bp, Mesocricetus auratus
atagcccaactttgtgtcaatattttgtgcataaacctctggaaataattcttaaaaaatttccacatttgttaatatatcattacatggatgacatcctgctggcctcc

SEQ ID NO: 4313 - DNA, 204 bp, Mesocricetus auratus; identical to SEQ ID NO: 671

SEQ ID NO: 4314 - DNA, 600 bp, Cricetulus griseus
gtggcagaatttgactcctttgtcctggtaacagcctacgttcccaatgcaggcaggggtctggtaaggctggagtaccgacagcgttgggataaagccttttgcaagtttctgaaggacttagcttcccgaaagcctcttgtgctatgtggggatctcaatgtggctcatgaagaaattgaccttcgtaaccccaaaggaaacaagaagaatgctggctttactccccaggagcgccagggctttggggagttgctacaggctgtaccacttactgacagcttccggcacctctaccccaacaccccctatgcctataccttttggacttacatgatgaatgctcgggctaagaatgtcggatggcgccttgattactttttgttgtcacactcccttttgtcttccttgtgtgacagcaagatccgctccaaagctcttggcagtgatcactgtcccatcaccctttacctagcactgtgacacccctgctgaagtaacttacacctgggaaatagcctcctctcaagtccagtgtcctttaggccccggggttttgattttttgtgtaccccctgttttaaatgttaaaccaagctt

SEQ ID NO: 4315 - DNA, 1113 bp, Cricetulus griseus
gggcggcgacggtttcctggtggccgcgcgctgctctgtgagcggcgggtggcagacggacctgggccctcaccccagacgcaccgcggatctggcatggctcacctgatgacaatgcagttgctgctcctgctgatatgggtatctgagtgtgcccaatcaagagctactcgggccagaactgaactgctcaatgtttgcatggatgcaaagcaccacaaagaaaagccaggccctgaggacaatttacacaaccagtgcagtccctggaagaagaattcctgctgttccaccaacacaagccaggaagcccacgaggacatttcctacctgtaccgattcaactgggaccactgtggaaagatgacattggaatgcaagcgacactttatccaggatacctgtctctatgagtgttctcctaacttgggaccctggattcagcaggtggaccagagctggcgaaaagagcgaatccttgatgttcctctgtgcaaagaggactgtcagcgatggtgggaggactgccgcacctctttcacctgcaagagcaactggcacaaggggtggaactggacctcggggtataaccagtgccctgtgggagcctcctgtcgccacttcgacttctatttccctacacctgctgctctgtgtgaggaaatctggagtcactcctacaaactcagtaactacagccgagggagtggccgctgtatccagatgtggttcgacccagcccaaggcaaccccaacgaggaagtggcaaggttctatgctgaggccatgagtggagctgggcttcacggggcctggccactaatgtgcagcctgtctttagtgctgctctgggtgttcagccgagttcctttaaccttctgatccccaggaactccctgccgggcttagactcccagctcccaacctcctttgtggtggggcctctgacaggcattcaatatctctcttatgaattatttgggtgtgaatgggaatataattattttgcatcctacttaccactgattgaagttgtttaaacttggttagttccctgctctaacacttactgtgggcaagttaaataaacttaattttcctgtgctgttccac

SEQ ID NO: 4316 - DNA, 600 bp, Mesocricetus auratus
  misc_feature (116)..(136): n is a, c, g, or t
tcctttgcaggattttcaagtgcttttagttgctgagccatttttccagcctttgaacaaaattttaataattggctttaaaagttctcccttgaataaggtggtagtggtacatnnnnnnnnnnnnnnnnnnnnnaaggcagagttggtgtatatttgtgagttcgagggcatcctggtttacaaagcaaattccaggacagccagagctcttatacagagaaatcttgtcttgaaaaaccaaaaaagtttttccttggttaaaaacaacagcaatttttcaattgtttatttttgagataggttctaatgtggtctagtttgctatacagctgaggctgggtcctgaactcctgatctttctggttatatctctcaagtgctgggatcacaggcatgcaccaccatacctggctcactctaacatatgttcatttggtcaaccctttttattctcagaaggaggaattgtcctaccacacagcagaaaccaaattctaatttttgatgttactttaatgccaagtacaattcagattacagttggggggagctgactattcaaagacctcatgcagcataaataatggctgaccaacc

SEQ ID NO: 4317 - DNA, 600 bp, Mesocricetus auratus
  misc_feature (355)..(394): n is a, c, g, or t
accaaggaagtagaatacattgtatcaactaacactgttgttttagccaatgtcctggaaggcggggacccaaccttcccacagctcacagcgtcccctcacagcatggacagcatgctgccctctggagaaggtggcccaaagaggactcatcccactgttccaggcattccagggggaaccagagctggggcaggaaaaataggtcgaatgattgcagaagaaatcatggaaatccacaggataagagggtcatcaccttccagctgtggctccagcccgctgaacatcacaagtacacctccccctgatgcctcctctccaggaggcaagaagattctaaatggagggactnnnnnnnnnnnnnnnnnnnnnnnnnnnnnnnnnnnnnnnnaagagaccccaggttatccatattctgatagttcttctattcttggtgagaacccccacataggcatcgatatgatagacaacgaccaaggatccagtagtcccagtaatgacgaggcagcaatggctgttatcatgagcctcttggaagcagacgcgggcctgggtggtcccgttgactttagcgacttgccatggccactgtag

SEQ ID NO: 4318 - DNA, 600 bp, Cricetinae gen. sp.
agagcactggaaaaagatccacaaccaagtggtggagagtggctatgaggtcctccggctgaagggctatacatcttgggctattgggctgtccgtgacagatctggcaagatcaatcctgaagaatcttaggagggtgcatcccgtttccacactggttaagggcttatatgagataaaggaagaaatctttctcagcattccttgtatcttgggacaaaacggcatcacagacattgtgaaagtgaacctgaatcccgaggaggaggcccttctcaggaagagtgcggaaacactctggaacgtccaaaaggacctcaaattgtaaagtttcagaattcgactgctgagcagatatgtgattgcgtattgcacatctcaaacctttccaaataataaatagttgaacaaactatcagagacctatgacataacagcatcctgttgagatgagacagacacagacgtttcctccttcccctctcttcgctacagagccctggctgcctggagctgcagactcagctcgcctcagagatctgctaacctcgaagttaagggcgtgcaccaccatgaccagctgaagtctctgcctttttc

SEQ ID NO: 4319 - DNA, 90 bp, Mesocricetus auratus; identical to SEQ ID NO: 677

SEQ ID NO: 4320 - DNA, 572 bp, Cricetulus griseus
  misc_feature (507)..(542): n is a, c, g, or t
ctgggcttcactttaatttggaagaatgtgcctaagacacagatgaagttcagcgtacagacaatgtgccccatcgaaggagaagggaacattgcacgattcttgttctctctgtttggccagaaacacagcgctgtcaatttaaccctcattgacagctgggtggatattgccatgtttcagctgaaagaagggagcagtaaagagagagcagctgttttccgctctatgaactctgctctggggaagagcccatggctggttgggaacgagctcaccgtggcagatgtggtgctgtggtccgtgctacagcaaactggggatggcagtggggtagcacccgccaatgtgcagaggtggctgaagtcctgtgagaaccttgtccccttcagtactgccctccagctccttaagtaagttctagcagcttgtcttacagggttcaacataagaatgatacagcttcaagtttgttgtcaggaaagggacttgtcctagaatcacaannnnnnnnnnnnnnnnnnnnnnnnnnnnnnnnnnnnagataatctgtggattttattttaagtcag

SEQ ID NO: 4321 - DNA, 1377 bp, Cricetulus griseus
agactttcaaggaccaaggattggaggtcttaaaacaagagacagcagttgttgaaaatgttcccattttggggctttatcagattccagctgaaggtgggggccggatcgtgttgtatggagattccaattgcttggatgacagtcacagacagaaggattgcttttggcttctggatgcactccttcagtacacatcatatggcgtgaaccctcccagcctcagccattcagggaaccggcagcgcccacccagtggagctggcttggcccctcctgaaaggatggaaggaaaccaccttcatcgatactccaaggttcttgaggcccatctgggagacccaaaacctcggcctcttccagcctgtccacacttgtcatgggccaagccacagcctttgaatgagactgcgcccagtaatctttggaaacatcagaagctgctctccattgacctggacaaagtagtgttacccaactttcgatcgaatcgccctcaagtgagacctttgtcccctggagaaagtggtgcctgggacattcctggagggatcatgcctggccgctacaaccaagaggtgggccagaccatccctgtctttgccttcctcggagccatggtggccctggccttctttgtggtacagatcagcaaggccaaaagccggccgaagcggaggaggcccagggcaaagcgtccacagcttacacagcagacccacccaccaaggaccccgtcagtgtgatcatcacagtggccagccacagaagccaacaagccttggaccactctgatggccacacagggcatcagaagagcatcctgggaggtgcctatttccaagggaccccatctccagcttgtggctgggttagtgtgttctccccaggcatctctgagttacatcctgaagtacctcactgtgctgggctcttgacaggaggtgctcagtagctcagcctccagtggtgtcagcaggcccagtgacagtgcaccaaagacacagagcctggaagggctgtcgggacacactttctacataaagcttacaatcctgaccaagcgaagaaatgcttgttacaggctattttctatatttattgtggggagagtcactttaaagacttgtactgtttggaagcaaagctgttgtgtttgtcagttgagtgcagttttctgcagtgacatcataaggagtcagatcccatgacctttttgatgagaggacagactgaactgaagggcatgtgcacagatctgggaaatgcaagccttcgctttatttttataagtatcaactgccatcatgttttgtaatttggggtcttgatttcaccattgttggtgaaagaaattttcaataaatatgcataacc

SEQ ID NO: 4322 - DNA, 579 bp, Cricetulus griseus
atgggtatgagccagaaatcttaatgagaagaccactagagcctttcctggcccccaaaatcaaaccccatggagaagccagcatttgatgtccccaacttctgctctggagagactatgctgggaccatgtactactgagcctgagatagggatgcaggtggagacaggcccaacttctactcctttattcctaaatacagactgttgaatatactgaccctgagcctaaggaggtttgggggaatgagatctataggttttaacctcaacctgcccatacctacagggtcccaatatggatattgtaggtaaccttcacaccagtctccagtttagaataccccaacaagaaagaagttaatcatagtggtttcctttgcacctattaccaccccagttcaatccaggaagggacttggttaaacctttctcaattgggtttgtggatgcctccaagccaagtcactagagtacagtgagtgaacccagcctcctacctgtcccaagatgcccttccccatcttgaccgtgctaactgtgtgtacatatatattctacatatatgtatattaaaccc

SEQ ID NO: 4323 - DNA, 353 bp, Cricetulus sp.; identical to SEQ ID NO: 681

SEQ ID NO: 4324 - DNA, 360 bp, Cricetulus sp.; identical to SEQ ID NO: 682

SEQ ID NO: 4325 - DNA, 496 bp, Cricetulus sp.; identical to SEQ ID NO: 683
  misc_feature (39)..(64): n is a, c, g, or t
  misc_feature (66)..(79): n is a, c, g, or t
  misc_feature (84)..(121): n is a, c, g, or t
  misc_feature (171)..(190): n is a, c, g, or t

SEQ ID NO: 4326 - DNA, 304 bp, Cricetulus sp.
cagaacccacgacagtacaagatcccagactggttcttgaacagacagaaggacgtgaaggacggaaagtacagccaggttctggccaatggtctggacaacaagctgcgagaggacctggagcgactgaagaagatcagagcccacagggggctgcgccacttttggggtcttcgtgtccgaggtcagcacaccaagaccactggccgccggggccgcactgtgggtgtatccaagaagaaatgagycgctgggccttcactgttaataaatagtttatatgcctgtgaaaaaaaaaaagctt

SEQ ID NO: 4327 - DNA, 579 bp, Mesocricetus auratus
  misc_feature (221)..(249): n is a, c, g, or t
gggcatgattaaccgtggagtggcaggatccattgtcaacatctccagcatggtggcctatgtcaccttccctggtctggccacgtacagctccaccaagggtgctataaccatgctgaccaaagccatggccatggagctgggaccatacaagatccgggtgaactctgtaaaccctaccgtggtgctgactgacatgggcaagaaagtctctgcagacnnnnnnnnnnnnnnnnnnnnnnnnnnnnnccacccactgaggaagttcgcagaggtggaggacgtggtcaacagcatcctcttcctgctcagcgacagcagcgcctctaccagcggctctggcatcctggtggacgctggttacctggcctcctagacggcccaggtgcaggggactcctggagacttccctggcctcacccttacatcaagaccccgccttcaacccaacccaataattttgttcgaatcctgtagagccccaccccacacacatccatccccaactttagactccgggatcccgccattccataccagctatgctgagataatttgattaaataagtatcccaaacc

SEQ ID NO: 4328 - DNA, 1400 bp, Cricetulus griseus
tatcccatgaccaacccggccccccagctcctgatagctccacaggaccagcctccaccccaactacccctgtccccagacccttcctcatcttactgtggacatggcccttccacagcccactgactctgtacccctgttccaagatgctcccaggcaccgccgactgccagatgactgtcaaccggagcttgtacccccaagcagatgcagtcatcttccaccaccgagaaatcagccccaaccccaggtcactgctgccaagtcagccgaggccgccaggccagcgctgggtgtggttcagcctggagtcacccagccactgcagcaggctgtcagccctggatggacacttcaacctaaccatgtcctatcgcagcgactctgacatcttcacaccctatggctggctggagccgtgggcagagcctccagtccaaacccaggtcaacatgtctgccaagactgacctggtggcctgggctgtgtccaactggaaccccaagtcggctcgggtgctgtactatcagaagcttcagagtcacctccatgtggacgtgtatggccgaggacatatgcccctttcccgaggggacatgatggggacgctggccagatacaagttttacctggcgtttgagaactcacttcacccagattacatcacagagaagctgtggaagaatgctctggaggcctgggctgtgcccgtggtcctggggcccagcaggaagaactatgaacgcttcctgccccctgatgccttcatccacgtggatgactttgagagcccagcagacctggctcagtacctgcagaagctagacaaggacagccagagctaccagcgctacttccgctggagggagacgctcaggcctcgcttgtctagcatggcccttgccttctgccaggcatgcaggcagctgcagtgggaccagaggtaccagacggtccacagtgtggcctcttggttccactgaggtggctggccagagtcctgcaggcagtgtcccactcaaaattcatcctctgttgcccctgtgttgtgctctatcgtgctgggtagttttatttcaatttgatacaaactagagtcatgtgggttgatggagccacaattgagagaatggcaccaccagattgacctgcagggcattttcttaattagtgattgatggtaaggcctcagctcactgtgggtggtaccatccctgggctgcttgtcctgggttctataagaaagcaggctgagcaagccatggggagcaattcagtaagtggcctctgcctcagctcctgcctccaggttcctgcctgactctgtgaatgatggagtgtgactgagaaatgtaagctgaaataaaactaaagttacttagccatcatggcattttagc

SEQ ID NO: 4329 - DNA, 600 bp, Mesocricetus auratus
gagccagccagccgtgcgccgggctgtgctcatgtgcgaggacgcactggtgcccttctatgagaaatttggcttccaggcggtgggcccgtgcgccgtcaccgtgggctccctcaccttcatggagctacagtgctccttacggtgccatgccttcctgcgcaggaacagcggctgctgacccaagctgcccactcggccacggagagggtggggagcagcaggcttggggttcctaattcccacgccacaccctcctctgcctagagcccatccaagtagagctggctagcatgaagggagagacggcagccgccagctggagtgcagaggtaaggatcaatgcagagggcaggaggtggccctgcctcagcacaggctgccatctgtccccaaaggacctcttgcattctgaactgtgcacaaagccaagaccaggatgggaaaccagagcggtgggaggtctgtccccacacacttctgcctctaccagctctgtttccgcaccccagtgcagcgccctgattcttggggtccttgctctccccagactgacaccccttcctggatcctaactgggaatgaggggcagccaggagc

SEQ ID NO: 4330 - DNA, 1400 bp, Cricetulus griseus
  misc_feature (320)..(334): n is a, c, g, or t
ctcgtcagtattgaaacagaagatgagcagagactgatagaaaaattcattgaaaacctcttggcatctgatggtgatttctggattggcctcaggaggctggaggtgaagcaggtcaacaacacagcctgccaggacctttatgcttggacagatgggagcacatcacaatttaggaactggtatgtggatgagccttcttgtggcagtgaggtctgcgtggtgatgtaccatcagccatcggcaccacctggcatcgggggctcatacatgttccagtggaatgacgaccggtgcaacatgaagaacaatttcatttnnnnnnnnnnnnnnnagaagccaagtacaacaccttctataaggcctggaggtgaagcaactgagccaccaacaccagtacttccagaagaaacacagaaagaagacaccaaagaaacattcaaagaaagcagagaggctgctttgaatcttgcctacatcctaatccccagcattcccctgttcctcttactagtggtcacttcagctgcatgttgggtttggatctgtagaagaagaaaacaagagcagccagatcctaccacaaaggagcaacacaccatttggcccactcctcaccaagaaaacagccccaacctagatgtttacaatgtcatcagaaaacaaagcgaagctgatttaactgagccccgcccagacctgaagaacatctcatttcgggtgtgttctagtgaagcccctcctgatgatatatcttgtgactatgacaacatggctgtgaacccttcagaaagtgggtttgtgactctggcaagtatggagagtggatttgtgaccaatgacatttatgagttctcccctgacagaatggggaggagcaaggagagtggatgggtggaaaatgaaatatattactaagacatatgaaaaactggcaaaaatgagaaaacaaaagcaaaagcctcctatttctcacaaggaaaatgttcagaaagtttatgaagatgctcagaccagttcttaaggtgagcacagaatctccacaagttcctactggggtccccaagttctggtatgtatcccttatcccagagcctcacccagctcagccttgtgagaaggcaccttgcctaggggctgccatacagcagaccctcaataactgtcagccagtgtgctgcaactgatgttcaagggctgatgcttccaatggtcaggataaaggtgtcaccaaggagtttggaaagcccgcctctaggctccttgctctctacagcagcacgtgcaatcatagaaagacataaactctggaatcttctcaaaggctatgtatggaagccccaggctggcctgcccagcaacaattcccatatcttcccctagcccaaataaaatccaat

SEQ ID NO: 4331 - DNA, 201 bp, Mesocricetus auratus; identical to SEQ ID NO: 689

SEQ ID NO: 4332 - DNA, 178 bp, Mesocricetus auratus; identical to SEQ ID NO: 690

SEQ ID NO: 4333 - DNA, 382 bp, Cricetulus griseus
acctttgaggagccggttgctgtttggagcgagttagcggtgcggagatgtggttcgagattctccctggcctcgccgtcatgggtgtgtgcttggtcatccccggggtggccactgcgtacatccacaagtacaccaacgggggcaaggaaaaaagagttggtcgccttcgttaccagtggtatttgatggaaagagatagacgtgtctctggagtcaatcgctactatgtgtccaggggcttggagaacattgactagagaagcattttcctggcggatgaaaaaattacttggttattcatctgttcctgctagaaggcaaatgcagcatattatatactatgcgcatgttatgtaatgcttaataaaatttaaagaac

SEQ ID NO: 4334 - DNA, 297 bp, Cricetinae gen. sp.; identical to SEQ ID NO: 692

SEQ ID NO: 4335 - DNA, 398 bp, Mesocricetus auratus; identical to SEQ ID NO: 693
  misc_feature (347)..(361): n is a, c, g, or t

SEQ ID NO: 4336 - DNA, 389 bp, Mesocricetus auratus; identical to SEQ ID NO: 694
  misc_feature (278)..(278): n is a, c, g, or t

SEQ ID NO: 4337 - DNA, 489 bp, Mesocricetus auratus; identical to SEQ ID NO: 695

SEQ ID NO: 4338 - DNA, 273 bp, Mesocricetus auratus
  misc_feature (155)..(155): n is a, c, g, or t
  misc_feature (157)..(157): n is a, c, g, or t
tggcggtctggtgacttcgttgatgctggcttgtgcttgcgccgcatcctgtcgtgagacctgctgtcccgtgggcccctcggggttgcgctgcaccagggcagggaccctgaataccctccgcggcctgcggggcgccgggaacctgacggagntntatgtggaaaaccagcgggatttgcaacgcctggagtttgaggacctgcagggcctgggggagttgagaagcctaaccatcgtgaagagtggcttccgctttgtggcccctgatgc

SEQ ID NO: 4339 - DNA, 380 bp, Phodopus sungorus; identical to SEQ ID NO: 697

SEQ ID NO: 4340 - DNA, 384 bp, Phodopus sungorus; identical to SEQ ID NO: 698

SEQ ID NO: 4341 - DNA, 1400 bp, Mesocricetus auratus
  misc_feature (74)..(105): n is a, c, g, or t
cgaggctgatgagttaggtgaaactctccctgactctactcccctgggcctctacctgaggtcccctacctccnnnnnnnnnnnnnnnnnnnnnnnnnnnnnnnnctcccctcaaggggaggccaggaaggaaggctggggtcctgctgtcccggctgcccagggcctcagcaacccaccgggggaggaggagcgaggccatgactctgacctatcatctgaggagtttgaggacctggggactgaggcctctcttcttccaggacttcctaaggaggtggcagatcatctgggccaggtacccccagggccagagcctgaatgctgggatcagggtggggagtctgatgggttcgctgatgaggaagagagtggggaggagggagaggaagaagagcatgaggacgggactgagtcaggggctcaatggtgggggtcaggaccctccaaggtccaacatgtcacccaaagaggggacctccaggaacacgagtctgtgggtatcagtggtccctgggatgatggctggagaggtgctgcagctggtatctctgtgactggcctggaaactgagtctcaggacagtgctgagccttctgggtcagaggtatctgagtctgtctcctcagagggggaggatcaagcccctgaccatttggataccccccaaggggtgactaacgtggtcccaggggcaggagacaccttcggtatcagtggccaggcccccaacttggagtcagaacacatgaacgggaggttggagaatgggttagagcagtctgaggggcagggagtcctggacaggcaccaggatcaaggacacccttcgcagcaacaggaagtgggtgccttaaaggcccctttgttagggtctcctgtgcaccgaggcccaagccagtccctggagttccctttgagtggggcagatagagattcctggtcctcgggggaagactagacagtgctcctctgatgctgagggcttcatggtggggggatgtcctcccttgctcggggccagcaccctcagtttcgatagcttgacctgtggtgtctgtcctggagaggtgtggcgggctgagggagatgaggtcctgtcagggccatcttgcttggattgtcctgaaggctcaagctgagtcccggcactaggccccctttcttctgcatctccctgccaggagaggcctggctctgagctttcccctggggctgctctggccaggtcttgctaaccctgcctgtctacagtagagccatcctcaccatgtctggtctggcctatacccagaggagctgagggcagcaattgtgaccaccgacctatcatcttatctcagcctgctgagattttgttctgctcttccttgtttgaataaagttgtgtccctccctac

SEQ ID NO: 4342 - DNA, 578 bp, Cricetulus griseus
ctacagcgagcaggattcctactgggtggagaacctcatggtccagcagttggagaattcggaacctcccttcaagctatgtctccacaagcgggactttgttcctggcaagtggatcattgacaacatcatcgactctattgagaagagccacaaaaccctgtttgtgctttctgagaactttgtgcggagcgagtggtgcaagtatgagctggacttctcccacttcaggctctttgatgagaacaacgacgccggcatcctggttttgctggagcccattgagaagaaagccatcccccagcgcttctgcaagcttcgcaagataatgaacaccaagacctacctggaatggcccttggatgaaggccagcaggaagtgttttgggtaaatctgagaactgctataaagtcctaggttctccacccagttcctgtcatgtgctatgacatgaactgtaacaaagtttattctgacttaattatttaagtgccatagaattgtacccttgaagatttaagtataactaataattgtgagctttatcgtgaatgctgttataaaaatattttatatt

SEQ ID NO: 4343 - DNA, 772 bp, Cricetulus griseus; identical to SEQ ID NO: 701

SEQ ID NO: 4344 - DNA, 600 bp, Cricetulus griseus
taatgtgtgcctgtaatttcagcaaggctggtggttctctgagttgaggtcagcctcgtctagccaagttataatataaccagggctgtatacactattttaaaggctttgaggacttaaccatagaagatactgagttacttacttggtggctttcttaattctctttctaggataaggatgctaagttccgcctgattctgatagagagcagaattcaccggctggctcgttactataagactaagcgggtcctcccacccaattggaaatagtaagtataagccattttgttggggagaatcaaccagatggtaaataacatggtagtgggtgtagtaaaccacttcgtggcagatattttgcctttctgggtcctatgcttaagtgccatttcagctcatctctgtcatagtagtggcaaaagcttacaaacttttaaattctcagtttggtgatgcattgtatgcagttaggtatttagctgtttggggatagctccagtagcaaagaaagttgttgcagtagatatcaaaaactaatactaattccccagtttccttcagtgagtcatccacagcctctgctctggtggcataa

SEQ ID NO: 4345 - DNA, 1400 bp, Cricetulus griseus
ctccgttcgatcaggtccttttggccagatcttcagaccagacaactttgttttcggtgagttacatggaatgaattcctttgtacccaagggcatgattccagaggtgaaaggtgaagattagtaatgataatgacgtaatttttttcccttctcaccacattccaggtcagtctggggcaggcaacaactgggctaagggtcactacacggagggagctgagctggttgactctgtcctggacgtggtgcggaaggaggcagagagctgtgactgcctgcagggcttccagctgacccactcgctgggtggaggtaccggttctggtatgggcaccctgctcatcagcaagatccgagaagaatatcccgaccgaatcatgaataccttcagtgtggtaccctcacccaaagtgtctgacaccgtggtggagccctacaatgccaccctgtctgtccatcagctggtggagaacaccgacgagacctactgcatcgacaacgaggccctgtacgacatctgcttccgcactctcaagctcaccacgccgacctatggggacctcaaccacctcgtctcggccaccatgagcggggtcaccacctgcctccgcttcccaggccagctcaatgccgacctccgcaagttggcggtcaacatggtccccttcccacgtctccacttcttcatgcctggctttgcccctctcaccagccgtgggagccagcagtatcgggccctcactgtgcctgaactcacccagcaggtcttcgatgccaagaatatgatggcagcctgtgacccccgccacggccgatacctcaccgtggctgccgtcttccgtgggcggatgtccatgaaggaggtggacgagcagatgctgaacgtgcagaacaagaacagcagctactttgtagagtggatccccaacaacgtcaagaccgccgtctgcgacatcccaccacgcggcctcaagatggccgtcaccttcattggcaacagcacggccatccaggagctcttcaagcgcatctccgagcagttcacggccatgttccgccggaaggccttcctgcactggtacaccggcgagggcatggacgagatggagttcactgaagccgagagcaacatgaacgacctcgtctccgagtaccagcagtaccaggatgccaccgcggaagaggaagaggatttcggggaggaggcagaagaagaggcctaagccagagagagagagccctgcgtcttctcctcaggctacttagttccctcagctttcttcagctgcccgtttttctccttcagagttttcttttctgctgcctctgtcctgtttttttatttttttccatgggggggtaaacagtgcctggcacatagtaaggcgctcaataaa

SEQ ID NO: 4346 - DNA, 1255 bp, Cricetulus griseus; identical to SEQ ID NO: 704
  misc_feature (512)..(548): n is a, c, g, or t

SEQ ID NO: 4347 - DNA, 299 bp, Cricetulus griseus; identical to SEQ ID NO: 705

SEQ ID NO: 4348 - DNA, 1368 bp, Mesocricetus auratus
  misc_feature (1062)..(1077): n is a, c, g, or t
ctgacgcttaaagttctcagtctgcagaagtggatcctggagaagtacttagacaatgagacactggctgctgaggacaggtcattcttctcactacagctggcaagtcccgaaacgcacctggtacccagaacaccggggctgcaagccctgcaggtccagctcacgcaggtccgcaccagccaggagcaactgcttcagcaggtggacaacctcactcggaacccagagctgttccggattaagggtgaacgaggctccccaggtatcccaggtctccagggcccgccaggcatcaagggagaggcaggcctccagggacccatgggtgcaccaagggagccaggagcaactggtgccccaggacctcaaggagagaagggcagcaaaggtgacaagggtctcattggccccaagggggaacatggcacaaagggagacaaaggagacctaggccttccagggagcaaaggggacatgggcatgaagggagtcacaggggtcatggggccccctggagcacagggaaataaaggcgatcctgggaaaccaggcctaccaggtttggctgggtctcctggagtcaaaggtgatcaaggacaacctggattgcagggtgttccaggcactcctggtgcagcaggaccttcaggtgccaagggtgagccaggccaccctggtcctcctgggccaacaggaccccaagggatctccgggagtccaggagccgcaggtttgaaaggaagcaagggggacacaggaattcaaggacagaaaggcacaaaaggagaatcaggagtcccaggccttgcaggtagaaagggagacactggaaaccctgggctggcaggccccaaaggagaaccaggacgacccggcctgaagggagaccctggaatgaaagggtcttctggccagcaaggacaaaagggagagaagggtgagaaaggccaatccttcaaagaggtccggattgtgggtggcaccaatcgaggccgagctgaaattttctataacaacgcctgggggacaatttgtgatgacaactgggataataacgannnnnnnnnnnnnnnncgcatgctcggttactccagtggcaaaggattcacctttggtggtggctctgggaacatctggctggatgacgtgaactgtcaggggacagaggacagtttgtggaactgcaggaagaacaactggggctctcacaattgcaaccataacgaagacgcaggcgtggagtgccgctgacgtgggtgccgcagatgtcaccctgcgtccccaggtgtctttgggctccaccctcatggagatctgtgggctccatcactctgttgaggggagattaataaagccctgctgggg

SEQ ID NO: 4349 - DNA, 600 bp, Cricetulus griseus
cgatgtattcccagctgtttgggaggttgaggcaggattgcttaatgccagcctgggcagcataacaagacctgattctcacacacacacacacaaaaatacagcccagtggggtgacacacacctataacttcagcactggggcgcctaaaacaggacgaacaaaagttcaaggccatccttggctacacagtaagatttctgagagggagaggtggggggggggagaaaggtgtgggagagagggggagggaggggcaggccagtgcaggcttttaatcctagcacttgggaggcaggcacattctgagttcaaggacagcctggtttacagagagaattgcaggacagccaaggctacatagagaaatcctgtcttgaaaaaccaaaagaaattaaaccttctggtgtgtagatgccaatcctgttgttggtggctgccctctcccataatacttggcatccagagcaggtgtttttcctcagacccccactctgaccttggttcattagttggcttgccctctgaccttagattctttttcctttcttacagtactccccttccctaaataagcaattttggcagctggcaaaaac

SEQ ID NO: 4350 - DNA, 600 bp, Cricetulus griseus
ggctccagtgatttgctgtcagaagcaatccctgagtccctgaaaaacatgctcctggtgatggacacggccgagatcttccacagtgcagatgcgagaggaggcagcccctctgccctctgggagatcacctgggagcgcattgattgctttttgccacacttacgtgacgagctcttcaagcagactgtcatccaggaccccatgcccacggaacctcacagccaaaacgctctggcctccacccacctgacccctgctgctggtgaccccggccatctaccttccccagagataccctcagaagtgggggcctgtgactcagagaagcctgagggtacccgagccaccagcagcagctctccgggatcaccagtggcctccagccccagtagactgagtccttccccagagggacctcccccattggcccagcccccactaatcctgcagcccctgacttccccgctgcaggtgggcgtgccacccatggctctgcccattatcctcaaccctgcactcatcgaggccacctctccggtgcctctcttgtccactccccgtcctacagaccctattcccacctctgaagtcaactaa

SEQ ID NO: 4351 - DNA, 600 bp, Cricetulus griseus
gaaaagcatgttttcgctaaaacatgtgagaagaatgttgaaaatactagaattggtcgtgtgttattaaaaaaagtagtcaccacaagtgtaaaaatttctgttttttgacctttatatatgtgtccgaaaatagatacttctgcccggatgatctccagtggtctggggtgcaggcttcaaacctgtagctgtttagcgacagagtggttcaattccacctttcgggcgggagtatctatcccattttgcttcctgcaaccggtactatgtgacaaactcctctaaatccccctctattcgtatttattcctcttcgtcattacttttttccggtcccggaaggatccaacacatctcagaagtgtatttaaatttgtcttctacagttctagcgtattcctgtctgtctctgatgtctctccttcaacgatttatttattattcatccagtcatttgctcgattatgtatttaatcatgcgtgcagctcttagtcatatatttgttcatttgttcactctggctcagtcctgtctctctatttgagctgtatggatggggacacagttgtgatcacacccttagccctggtctcatg

SEQ ID NO: 4352 - DNA, 600 bp, Cricetulus griseus
  misc_feature (285)..(297): n is a, c, g, or t
  misc_feature (299)..(331): n is a, c, g, or t
  misc_feature (399)..(421): n is a, c, g, or t
  misc_feature (427)..(458): n is a, c, g, or t
ggacctgggttcaactctcggtacccacatggcagctcacaactgtctgtaactctagttgcaggggatcttgttaccttcaccccaatgcatataaaataaaggtcaaataaattatattaagaaaattaaaaggttaagtgcagggtttggtgcctggtgcttagaaagtgctgagtattcttaagtaggattctgtatacagtttatagttcttgagatttgtaaaaaaaatttttggcccagatgatttccagtggtctggggtgcaggcttcaaaagctnnnnnnnnnnnnngnnnnnnnnnnnnnnnnnnnnnnnnnnnnnnnnnacaggcggatctctgtgagtttgaggccagcctggtctccagagcgagtgccaggataggctccaaannnnnnnnnnnnnnnnnnnnnnngggggnnnnnnnnnnnnnnnnnnnnnnnnnnnnnnnngttggagagatagaaggcttggtggttaagagtctcactgctcctccagagaacctgagtttgattcatgacctcatgacagacagctcacaaccacctgtaactctagcttcaggaatctaattccttctggcctctgcag

SEQ ID NO: 4353 - DNA, 600 bp, Cricetulus griseus
  misc_feature (66)..(116): n is a, c, g, or t
  misc_feature (257)..(310): n is a, c, g, or t
tcggacgggagtatctatcccattttagccgggagttggtagcacacgcctttaatgccagcactnnnnnnnnnnnnnnnnnnnnnnnnnnnnnnnnnnnnnnnnnnnnnnnnnnncagagccagtgccaggataggctccaaagctacatagagaaaccctatctcgaaaaaccaaaaacaacaacaaaaaagattcctagaaatttcaaaaaaagtgtttggatctgatgaacaaaattcagcaaagtggcagtnnnnnnnnnnnnnnnnnnnnnnnnnnnnnnnnnnnnnnnnnnnnnnnnnnnnnncaatacaaaaaacatatgtaacagcaatggttgatctaaaattgaaattaatgaaacacttccattcatcatagcatctgtgactaagataaaaatgaatgcagtgaagaatgtacaatatttgtacattgaaaactacaaaacatagttgcaagtgactaagaaacaaggaagaaaacataatattttatggaatataagggtcaatactgttaaatattatcagctatctaaatatttagtgcaatcactgtcaaaattcccataagttttatctaagaaatggatga

SEQ ID NO: 4354 - DNA, 480 bp, Cricetulus griseus
catcttgcccaaaaacaactaactggaggaaaggtttacttgggttatagttccaggctacagtggaccatttcaggaagtcaaggctggaacaagtcacatcccatgcatagctaagaagagagcagggaaagcacccatgcttcccacctgctgctacttagccatctttctcctctcctatacagttcaggacccctgcccagggaatggtgtcacccacaatgggctaggtcttcctacagcaattaatgattgagacaatccctcccacacaccagacatactggccaactgaataaagacaactactcaattaaaactcttctgttgggctcagatgatcctcagtggtctggggtgcaagcttcaaacctgtagctgtttagtgacagagtggttcaattccacctttcaggcatgagtatctatcccattttgcttcgtaaaaccagtatttcctggctttggtggtgcaca

SEQ ID NO: 4355 - DNA, 302 bp, Mesocricetus auratus; identical to SEQ ID NO: 713

SEQ ID NO: 4356 - DNA, 218 bp, Mesocricetus auratus; identical to SEQ ID NO: 714

SEQ ID NO: 4357 - DNA, 574 bp, Mesocricetus auratus
ccacggcacggtacacccccacctggctgcagctgcccaccttcccacccagcctcacctctacacctacacagcgcccacagccctaggctccacaggcaccgtagcccacctggtggcatcccaaggctcagcacgccacaccgtgcagcacactgcctacccggccagcatcgtccaccaagtccctgtgagcatggggccccgggtcctaccctcgcccaccatccaccccagtcagtaccccgcccagtttgcccatcagacgtacatcagcgcctcgccagcctccaccgtctacactggatacccactgagtcctgccaaggtcaaccaatacccttacatataaacactggaggggccgcagggagcggggtggaggagcccccagcagacctggggagccgggtttctctactgcaggtgcctgccgcactcaaacaatgcaaatggggcagggagggacagctgggacacagatgaaacttgaactagaagtgggaggacttagagcagagaagagagcattttagaaggaagggattcaggagtgggaaatctatgcttttta

SEQ ID NO: 4358 - DNA, 600 bp, Mesocricetus auratus
tggtccccaccctttggtggtggatgttaagggaacctttttgggagctgagcttatggtaggaccacaataaagctttaagaacccgtacagtagaattccgaccctaatcatgaagctttactggaaagaactaggactgccactacccactgtctgcaccgaactcagacagcagcggccggctctggagcagggtgagccttgggttcctccgccttcagaaccttcaataaatcaaagacaggtgtctttgcttgctaccccgccccagtctacaccacgtggggcccgagctccgagcgaaaggggggccgagaaactctctgtggagggaacctttgcgaccacacctctctcggttattcttaaattccccgcaaccactgaaccgtaggaccaccgacagaaaagcgccgtttgtgcaaccccgcctcttccgctacaagcttggttcgcttcgatcccgccccttcctccgtgccgaccccgccttttcccgccgcggactctcaatgtccggggtcctgacgcttttctgagccgccctacatcgaagttcccgcacgtgggaggcccggccggatcttgagcgcgatg

SEQ ID NO: 4359 - DNA, 1370 bp, Mesocricetus auratus
acaccagctgcctgctcactgcctgtttccctggtgtggcttactgctggacactcagactctggaggtgctctgtgactacactggttatgcccggacctcaattaaggccagcctcaccttccagcgcaccttcaaggcggggaggaacatgcgacagaagctcttagctgttttgcggttgaagtgtcacagtctgtttctagacttgcagatgaatagccttcagacagtctgtatcaatgtgtacaagatcttcctgcttcaggcctacaggttccatgcgtgtgcgcttcagcttccctttgaccaacatgttagaaagaaccccgcattctttctgagcatcatctccaacatagcatcctgctgctactccatcctgaaggtcaagaatgcaggaatgacactaaaggccaagggtgcctctggctcatttcctcctgaagctgcacgttggctctgctaccaagccttcctgctcaagctggctggtcattctgtcacctacaagtgtctcctgggacctctcaggacagcacaaaaacagctgtgccggaagctcccaagggcaacaatggccatccttgagactgccgctgacccagccctaagcacagactttcagaccattttggactaacccctccccttcagctggatgaacatgggcattgtagcctcaccactcctggatgcatgccacaagagggactgacctgttgtgaggccagtttgccctccaaaacatgtgccagggctgtagtatgggggttgtccctgtgccgtgtttcctgtggtggacttgatttctttcctgatgcctccggggaagcagctcccacccctctcggtggcagggatccactagccagtaacaccagacagaggagaagatgcctgggcactgggacagtgtgcacggatctgagatgcccggccctgtgtctcttcacatctaacccatggagcctttcccaacggggtcacagtagaaagtgtttttggggggcttacagttttaaaggtttagaatctatgatcatcacggtagggagcatggcagcaaggaggcaggcatgtgtcttctcacgcctaaccgaggagccttttccaatgggccagtggggtcagaatgtctcagagatgaaaacaggactttgaactgatgtgggggtttgaagatgtgtagtccccacagacccgtgtgttcaaatgcttggcctattggaatgtcactattaggaggtgtggcttgttggaggaagtgtgtctgtcactgtgaggacagggctttcaggtctcatatatgctcaaactgtgcccaatacacagacgacttctgctgctatgaataaagatgtagaact

SEQ ID NO: 4360 - DNA, 1381 bp, Cricetulus griseus
atcttactaataatccctttgcctgtatatgtgaacatcagaacttcctgcagtgggtcaaggaccagaggttgttcttagtgaagactgaacaaatgacatgtgcaacacctgtagagatgaaggactccctggtgctggactttaggaatgccacctgttatgtgcagaagaccatcatcagtgtgtcggtgatcagtgtgcttgtggtatccactatagcatttctggtctacaaattctatttccatctgatacttattgctggatgtaaaaagtacagcagaggagaaagcatctatgatgcctttgtcatctactccagccaggatgaggactgggtgagaaatgagttggtaaagaatttagaagaaggagtgcccccctttcagctgtgcctccactacagagactttattcctggtgtggccatcgctgccaacatcatccaggaaggcttccacaagagccggaaggttattgttgtggtgtctagacactttattcagagtcgctggtgtatctttgaatatgagattgctcagacatggcagtttctgagcagccactctggcattatcttcattgtcctggagaaggtggagaagtccctgctgaagcaacaagtggagctgtatcgacttctcagcaggaacacctacctagagtgggaggacaatgctctggggaggcacatcttctggagaaggctcaaaaaagctctgttggatggaagagcctggaatccagagggagcaacagaggcagaaaacaatcaacaagaaacaacaacttccatctgaggaggacaaaacatcttggtctaatactcattctgtttacaagtattaaatattacagctcaccatggattatgttgtagacaagggtcccatggtgcacaaggtaccaaaaggctggtaaactaatggaccttacaaagcagaaagtgataatattatgctgaaactccatgccttccaggggtgctctttcaccaactcaggcaaagaatcataaccaagaaagtcagctcctactgtatcaagctgaaggaaaagaggctaagccccagtgagaccaaaaaggagcattagttatcccttggccttttgagtctatataatatatcatgtactatgtttcaactaccaactgaactgaatgtttatttactttcccttcttactacttaatgcaatttaaattccactggctctctttgtgtgtttgattccaagttcatgttccattatatgtcattttcttttttacctatttctttaggaaacctgattaatacatgctcatggacatcctggccaatacttagtatgctgtatttattaaataaaaattcctaatatacttttatttttat

SEQ ID NO: 4361 - DNA, 1400 bp, Cricetulus griseus
agtgctgttaatgggtttagccccttggacagaggaggtgggatggcctctcattgggctgggtaaaatgagcagtactcaccagagctcttgccctcggtgccagcccttcattgacagccagcatgtcatccacaaatacttcctgcctcgtgcctacgctgtcctcatcccgctggccacgggcctcctgctgctcctatttgtgggtaagtctcccattctccaaaagtctcctgactggggggcaagatgtctggaaggccagccactctcaccccaagtgtgcgtccatactttggcacttggtgttcatctgcctagaagctccttggccccaactctccctggggttttcctgttcctccttaaaggctacaagcagaaagccctctgcttgttccagtgcttcaggtttgtggggcagtaagggatgtctgtctcccttttcctgtctcagcttcatcttcacacctccgccacctacccttttgtcaccctgtcacctctcttattgcttctgtgggttggggactgtgtcttcatcattacagcattctaagctctagcgcaggagtgacgctgaacgagtgctaggagcgttcgggtgactggacgatgggacggtgctggtaggaaggagggtggatatgtgaggacatggatgggcagatcactcaccatgaaatctgaagcactcagcaaagcatgtgacagatgatgagtggccatggggcttaaggaatgactgtgaaggtgcctacagggtgtttgtttgggagccctggccatccagccttcattctggtccttttgctctgtgtgttctaggattgtttatcacctatgtgatgctgaagagccgaagactgaccaagaaggctcagtgagggtccagcagggatgaggataccagccttctccatatctcctccagggaagggaccaagtgtcacatcctgatacagtcagcctgactgctgcagtcctctttaggaggtggggctgcttacagctcaactctgacaaactggagccctctcctctcttattcatccttctggaagccaagaggaacgtgggttgggaaacctctccctcatggcttcgggctcagggcctgaacattgctggtcctgtccacctacagtcaaagctctctgccactcccacaaggttctgctctcttgcctgtttttcctcctgtcatgtgctgatagatgctgcaggctccccgtttgtgtgcagcctcccctcgccgtacaacctatctcttcacatggcagctcttttgagtctgacactgtccagactccatgaggacttctgcacccagaaagccctagtcccagctggcctgtgtttgggaaaacttacaaataaatgttgatcatgttggt

SEQ ID NO: 4362 - DNA, 447 bp, Mesocricetus auratus; identical to SEQ ID NO: 720

SEQ ID NO: 4363 - DNA, 464 bp, Cricetulus griseus; identical to SEQ ID NO: 721

SEQ ID NO: 4364 - DNA, 600 bp, Cricetulus griseus
agctgtgagaggggccgggagcagagcctgcaatgccgctatcccggagaacagtgtgttgaggtggtcaccctacggagcacggaaaggagtctgaaggatgagaactacaccagaggctgtggcagtcttcccgggtgcccgggcatagccggtttccatggcaaccacaccttccacttcctgagatgctgcaactccacccactgcaatggcggcccagttctaaatcttcgggacttaccaccgaatggcgtccagtgttacagctgcgagggcaacagcacccacgggtgttcctccaaagagacttccctcgttgactgccggggaccgatggatcagtgcctggaggccaccggcttggatgtgctggcaaaccggagtcacaccgtgagaggctgctcgacggcttcctggtgcccaggctcccatgtggcagatgccttcctcctgagccaccccaacatctcgtgctgtgatggcagcggctgtaatggacccagaagcggcgcccccaggacagaccctgctcgtctaggcctcatcgtctccctgctcctgaccgtcagactgtggggaggcactctcctctggacc

SEQ ID NO: 4365 - DNA, 827 bp, Mesocricetus auratus
gattaccacataagctgcagaggaaggagtccagagacagagcaagatgagctccgagacaggtcctgtcgttgttgaccccactctgaggagaagaattgaaccccacgagtttgatgccttcttcgaccagggggaacttcggaaagagacctgcctgctctatgagatcagatggggcggcaggcacaacatctggaggcacacgggccagaacaccagcagacacgtggagatcaacttcatagaaaagttcacttcagagagatacttttacccatctacccggtgctccatcgtctggttcctgtcctggagtccctgtggggaatgctccaaggccatcacagaatttttgagtggacaccccaacgtgactctgtttatttatgcagcacgactttatcaccacacggatcagcgaaaccggcaaggactcagggacctcatcagcagaggtgtgaccatccggatcatgactgagcaagagtactgttactgctggaggaattttgtcaactacccaccttcaaatgaagtttactggccaaggtacccaaatctgtggatgaggctgtatgcgctggaactgtactgcatccatctaggacttccgccctgtttaaagataaaaagaagacaccaatacccacttacgtttttcagacttaatcttcagagttgccattaccaaaggataccgccccacatcctttgggctacagggtttatatgacctctgggagttggagatgaataaaatgactcccttgtatgtgtactgtttggacagcaagcaatggtgacctattaaaaagtatcaagct

SEQ ID NO: 4366 - DNA, 600 bp, Cricetulus griseus
aaaaacacttaaagcattaaaaaaataagactgaccaaataaaaacttgataggatctctaggtcctacttaaatagccattccatcccatctagatccacggagaactgtgtgataggctatgaccgaaattaaagcgggatgctttacattaagatatgcaagtttatgtagagaaaacaaatactatagactctataatgttcttccacctaactagtatttaattatgtggatttcttttatactacaaaagattgtttgagtttgtctttttgatactgatgcaattgtttggctgttcttacattctgtctgctgctgcctgttgtctcacattttgacccattgtgttaagaacctattgtgctcctttgtaatcaaaaaattgggggggatgctaattgaatatttgaaaaataagtataaagtgtttgttactcaaaattttatacatttgtaaattctaattacatatgtgaatggtaatagtctcagtgaattgattattggttgcaaatgcccctggcagtaatattggatgaaactttctttaaggcagaagacattaccttaatataaaatagatgtaaactaaaa

SEQ ID NO: 4367 - DNA, 562 bp, Mesocricetus auratus; identical to SEQ ID NO: 725
  misc_feature (422)..(454): n is a, c, g, or t

SEQ ID NO: 4368 - DNA, 600 bp, Cricetulus griseus
ctgaatgctgtgtccttagtcaacctggtgatgagctgtggcatttctgtggagttctgcagccatataacaagagcattcaccatgagtaccaaaggaagccgagtaagccgagcagaagaggcgctggcccacatgggtagttctgtattcagcggaatcacacttacaaaatttggagggattgtggtgttggcctttgctaaatctcaaatttttgagatattttactttaggatgtacttagccattgtcttactcggagccactcacggactgatatttcttcctgtcttactcagctacgtaggaccatcggtaaataaagctaaaagacacaccactcaagagcgatacaaagggaccgagcgagaacggctcctcaatttttagccttgtagcaggctttggtgactttgtctatggagaggtcaagtttctgcaggaaagctgtactgtcaaggccatgctggattctggttgttcctaggcattaggctgtgtcacagctgtggcaaatgcagctccacccacgtttttaaactcaggaatgcacctgtgacttgtgaagcagtattatggaaactgaaggtgacagaa

SEQ ID NO: 4369 - DNA, 249 bp, Mesocricetus auratus; identical to SEQ ID NO: 727

SEQ ID NO: 4370 - DNA, 1400 bp, Cricetulus griseus
  misc_feature (435)..(451): n is a, c, g, or t
ctgtgaggacaaaatgcaatatttagaaataggatctttaggctgggagggagaaaagaggaaaaaaatgaaagtataacatttttcataagtataagatttcataaaaaaatgaaatctataacatagagggtgttgataaagtaagcatggatatgtttagtaaagccgacagagctaagaattagctttgtgagtaattggacttaatcaaacttttcaaggtgggatacaaatgaataattgtagaataaatggataaaagaatatgaataaaatgaatagtgagtaaaaattaaaaatgaagctttttacttaagtgcatattgtagtggctagaacaaatagattcaaaatagaaatcatttatatattcttgattagaagataaaatgttattttagaaatagccatctttggaagtaaatttgctannnnnnnnnnnnnnnnnttcataatttgtctcttattttttttcaggaagaaaaaaaaacttgacttatttgtactgctaagttttattcaatgtgcttgcttgcttaaatttttaatgaagttttagtcatttggtggtcaaattccttttatctactaatcgcttttcgtggctttggcttttaaaattgtatttactgcatttatttgtgtgtattaggagtcaggtggccatatgtgccatggcatgtgtatggaagcacttgtggacatgaatcttctctttccacatgtgtgggccactggaatcaaactagtgtcaggcttggcagcaatttttaatgcactgagccttctcaccaccccctggacttttgtggggcagaaggggacaagtttaatattttatttactccatgtagaaagcctttaaaaaatgtagaaagcctttaaactacctattgttttatttgaattatgaagctcttgtgtttatataaattacagttaggtactgtggagactaatggtagctacaatagtaatattaatagctaaaacttagtagaatctgattgagttaatttggccctttccatcataaggtactcttcccaagcatcacatgacctgtgcttaagtctggtgggggcttatggctttgatattgaaaacaaatcgtcaaggatgttaatttcttgttactgctattacactgaattttctatggctctttaggagaggaagagacaagtcttcttttggcaggtgttactaagtaggccatttcccaaggaacagggaatttgccaggcttttgtggtggagagaatagaatgaataaatgctgtggggagtaaagagcttgtcagaagatgattagttctgtggcaccaaaaccaagagatcagttttcctgtgagaagtaaaggaagcattgtagaaaaatagatgtgttgaagtct

SEQ ID NO: 4371 - DNA, 396 bp, Mesocricetus auratus; identical to SEQ ID NO: 729
  misc_feature (263)..(279): n is a, c, g, or t

SEQ ID NO: 4372 - DNA, 555 bp, Mesocricetus auratus; identical to SEQ ID NO: 730

SEQ ID NO: 4373 - DNA, 540 bp, Mesocricetus auratus; identical to SEQ ID NO: 731

SEQ ID NO: 4374 - DNA, 600 bp, Cricetulus griseus
  misc_feature (373)..(390): n is a, c, g, or t
ccacaagaagcggcttccccttgcagaccaagccacccacatgattcgaacattaggctgcagggggctaaggactgcagcagctcctgcagtctggccgcccccatggagagtgatgccattcaccagcgcaagctccggaagctccggcagaaacagctgcagcagcagttccggcagcagatggaggcccacctacagggccacacacctgccgtaaaagtgaaagccgagcgtgaggcagtgcttccagaccttcctccaaaacacagtacccctgtaactgctgcctcagaactcctcagggagaaagccatttttccagataaccctgaagacaaccttgaaatgtgggacctgactccggatttannnnnnnnnnnnnnnnnnttgtctagaccagaaccacctcaaacctctgccaccagagtccaggtgatccaggatggtgtcctacacggcctttgccaccagatgccaccagaaaaacatgaagctggtcacctgcaggcccacagcactcaccagcatgtattaggaaactctgactctcataggaagagccaggacctgaagaaaaggaaaggtgatccatcctga

SEQ ID NO: 4375 - DNA, 600 bp, Cricetulus griseus
ttcctctaccccagaagccatcccactgaccagccgccaggcctgagccccccgctggcccgcaagcggggcctggttgcctgggttgtgagccactgggatgagcgccaggcgcgggtccgttactaccgccagttgatccagcatgtgcctgtggacgtgtttggtcgggcggcagtcgggaaaccagtgccagccagcgggttgctacacactgtggcccgctacaagttttacctggccttcgagaactcacaacacgtggattacatcactgagaagctgtggcggaatgccttcctggctggggctgtgccagtggtgctaggtcctgaccgtgccaactatgagcgcttcgtgcctcgtggatccttcatccacgtggatgacttccctagtgctgcctccctggctgcctacctgctctttctcgacagaaacctggctgtctatcgccgctacttccactggcgccggagctatgcggtacacattacctctttctgggatgagccatggtgccggacatgccaagctgtgcagacctctggggaccagcccaagagcatccaaaacttggcaagctggttcgagcgctga

SEQ ID NO: 4376 - DNA, 600 bp, Cricetulus griseus; identical to SEQ ID NO: 734

SEQ ID NO: 4377 - DNA, 476 bp, Cricetulus griseus; identical to SEQ ID NO: 735

SEQ ID NO: 4378 - DNA, 600 bp, Cricetulus griseus
  misc_feature (400)..(416): n is a, c, g, or t
tctgtgggtaatttagagaaatggttttggaattaatgtttccctcattttcaaatttaaggaaatgtattaacatgacatcatataagttgtaaggataagaagagaaacaccttgctttcaaatcacagtttattttaattgccctcccttgagtaacatgtatattttgatggaaaatttttaagagctcagaattagcaatcacttcatttggattaaattatcctgtatatacgtgataatgagcactgaaaataatttattctccactctcatttgtaaacattcttttttcacatcttatagttgtctgtaaagtaagtttatgattcaattgtttctacatcaatcagatctttagtctgtttgggaaatggaaatgggtgtcctaaaatannnnnnnnnnnnnnnnngtattataatgtctagattctagtttgcataatggtaacaaagaagtattagagtatcacttaattcttaacctctttgagttcagagttgacactgtgtgtaattgatgtactttttaactgtttaccacatttgtgaagacagactgactcatgttgtaaataagaaagatatgaagcagaa

SEQ ID NO: 4379 - DNA, 448 bp, Cricetulus griseus; identical to SEQ ID NO: 737

SEQ ID NO: 4380 - DNA, 600 bp, Mesocricetus auratus
gccgccaccaagcgtcagaagtacgagcggatcagtgagaagaagatgtcaacgcccattgaggtcctctgcaaaggctacccctccgagttctcaacatacctcaacttctgccgctccctgcggttcgatgacaagcccgactactcctacctgcgccagctcttccgcaacctctttcaccggcagggtttctcctacgactacgtcttcgactggaacatgctcaaattcggtgcagcccggaatcccgaggacgtagaccgggagcgacgagaacacgaacgggaagagaggatggggcagttgcgggggtccgcgaccagagccctgccccctggcccacccacaggggctactgccaatcgactccgcagtgcagccgagcctgtggcttccacgcctgcctctcgaatccagcaagctggcaatacttctcccagagcgatctcacgggccgaccgggagaggaaggtgagcatgcgactccacagaggcgcacctgccaacgtctcctcctcagacctcactgggcggcaagaggtctcccggatttcagcctcacagacaagcgtgccatttgaccatctcgggaaatga

SEQ ID NO: 4381 - DNA, 600 bp, Mesocricetus auratus
gtgtgaggcaggtgcaggctaaccaggaatattatcagcagtggagtctggaggagggtgagccttgtgccatggacatgtctacttacaccctggaggaactggagcatatcacatctgaatacactcttcgaaaccaggataccttctctgtggccgtgtccttcttgacaggccggattgtctatatttcggagcaggcaggtgtcctccttcgttgcaagcgggatgtgtttcggggtgcccgcttctcagagctcctagctccccaggatgtgggtgtcttctatggctctactacaccatctcgactgccaacctggggcactgggacctctgcaggttcaggcctcaaggacttcacccaggaaaagtctgtcttctgcagaatcagaggaggtcctgaccgggatccagggcctcggtaccagccattccgcctaactccatatgtgaccaagattcgggtatcagatggagctcctgcacagccatgctgcctactcattgcaaagcgcatccactctggttatgaagctccccgcatccctcctgacaagaggatctttaccacgcggcacacacctagctgcctcttcc

SEQ ID NO: 4382 - DNA, 1400 bp, Cricetulus griseus
ctaacccagccaggcatggtgggggctggggcagcacaagcctgacgatggctatggaggctctccaggccttcctctttccctccccctctcgcctctgcagctcttggggtgaagcgctgttcctgacactacagacaattaccatctgcttcctggtcctgcactacagaggagacactgtgaaaggtgcggggatgtgctggagagcgggcactgggtcttgggaaccttgctggggactcaggaggctcaagagggctccttgtctccctgacccccaggagttgctttacttgcctgctatgcgacactcctgctggctctgctttctccactcacgcctctggctgtagtcaccatgctccaggcctccaatgtacctgctgtggtggtgggcaaggtgggtactcggaagtgaaacgaggtgtgtgtggtggcggcgggatggaaccccaaagtatgcagtattggttttcgagaatgagggattagtgatgggaacacaggggaggttcagatgacagaaccaaacaaaagtgtggatttctcctctagttgctccaggcagccaccaactaccacaacgggcacacaggccagctttcagctatcacagtgtttatgctgtttgggggctccttggccagaatcttcacttctgttcaggtagtgcacctctgcttctagagggcacttaaacctcatactcccagtggaacctttctagactggtggctctccttaacaggaaactggagaccccctcatggctggagtctttgtggtctcttccctctgcaatggcctcattgccgcccaggtcctcttctactggaatgcaaagcctccccacaaacataaaaaggagcaatagtgctgagctagcttctagaatcattcattccacttccattcagccactcaacttgagggtcttccccacttgacgtggtctgctggtgcaactcagtcgtcctccattcctgcataactgcaacctcctgagccagggtttgtgtaaagagtaaaaagcttttccaagtcctgtattcactcgtttcaccaatggctgaggtccctcctttataagcagctattttgttattggagcagacgccttgccttgtccacttaccttctttcaggatggaggacagagcctggacaaatgtggttgggagcttgtggctgcgtccctctgccagctggttgggacagtctattggaccctagttctgaaggtgggggaggggagaatgactcaggtaaaggcctcagggtggagtagggaggttcctgctgtggcaggtccacgaagggtgtggagaaggcacaggttgctgttgtagtgggaatacagatgggacaataaagactcggagacgtgctttcattgt

SEQ ID NO: 4383 - DNA, 600 bp, Cricetulus griseus
gaggattgtggggtaccctgcacgcagccatttctgggataactctaaggagcggtggggatacacctccaagtggacaaacgactactccatggtgttgacaggagctgctatctaccacaaatattatcactacctgtacacccattacctgccagccagcctgaagaacatggtagaccaactggccaattgtgaggacattctcatgaatttcctggtgtctgctgtgacaaaattgcctccaatcaaagtgacccagaagaaacagtataaggagacaatgatgggacagacttcccgtgcttcccgctgggctgaccctgaccactttgcccagcgacagagctgtatgaacacgtttgccagctggtttggctacatgccgctgatccactctcagatgaggctagatcccgtcctctttaaggaccaggtctccattctgaggaagaaatacagagacattgaacggctttgagggatcccactgagtgggggaggggaagaagataggactggagtccagctgctctctcttcccggtgcagagccactcagctcatcgatggagccagactgtgccaagtatcaaaaatt

SEQ ID NO: 4384 - DNA, 1400 bp, Cricetulus griseus
cctccaagacaccaaagaaaactactcatcatccaactcctcagattcggggtagaaatatcgctgtccaggagccaacaagtgtgcttgaagaggcccggctgatgctgcatgtttctgctgtgcctgactctcttccctgtcgagagcaggaattccaagacatctatagctttgtggaaagcaaacttcttgatgggactggagggtgtatgtacatttctggggttcctgggacagggaagacggccactgtaaacgaggtcatacgctgtctgcagcaggcagcccaaacaaatgatgttcctccctttgaatatgttgatgtcaatggcatgaagctgacagagccccaccaagtctatgtgcagattttacagaagctgacgggccagaaggcaacagctaatcatgcagcacaactactggcaaagcgattctgcagccaagggtcccaacaggagaccactgtgctgcttgtggatgagcttgaccttctttggacttccaaacaagatgtcatgtacaacctctttgattggcctactcacaaaggagcccggctgatagtcctggccattgccaacaccatggacctgccagagaggatcatgatgaaccgtgtatctagtcggctgggtctaaccaggatgtccttccagccctattctcacaaccagctgaaagagatcctagtgtcccgactcaagcatttaaaggcctttgaagatgatgccatccaattggtagccagaaaggtagcagccctctctggagatgcacggcgctgcctggacatctgcaggcgtgccaccgagatttgcgagctttcccataatcatggcaactctctgggcccagtgactgtgtcccacttaatggaggctatagatgaaatgttctcctcatcctacatcactgccatcaaaaactgttccctcctggaacagggcttcctgagagccattattgcagaattccgtcgatctggactagaggaagcaacatttcaacagatatacagtcaacatgtggctctgtgcaggatggagggactgccttaccctaccatgtcggagaccatggctgtgtgctcaaatctgggttcttgtcgcctcctcctggtggagcccagcaggaatgacctactacttagagtaaggctcaatgtgagccaggatgatgtgctctatgctctgaaagaagagtgaagagcttcacagacttctgctgtttctcagcctatttatttttcttcagaacatgaataatagcaaaatatacagaatggaaatgattgttgtagattttggcatttatgttatttagtttgctttttccagagtgtttgagaaatttgtggtaatgtactatgtatataaataaataaaaataaatat

SEQ ID NO: 4385 - DNA, 1400 bp, Cricetulus griseus
tacatacagtccttatactgaagaaacatcctatgagaattcccttctggttaaacagtctggatctctcccgcttagttccctgattcatgtcttacgaagccttacccccaatgcaagggggattttcaggctacttataaaattccagctggataaccaggacagcccttcctacattggactttcttttcaagatttttaccagcagtgtcgggaggcattccttgttaatagtgatctcacacttcgagcccagctaactgaatttagggatcacaaactcataaaaacaaagaagggaactgatggtgtagaatatttattaattcctgttgacagcggaacattggctgatttcttggagaaggaagaggaggaggcttagactgtcactttttaggtggaagagtcattgttccccagctgccgatccttagtaagaatgctcttttacatccaacattagatcattctgtccagcatacaagttttaccattgaaggggcatgtcatcaatttgaacttggattagcctggctggtgtactgtctctgtggtcattgagctgggggaaaaaatgtgcctttaatttattacctctctgaggacttcttgctggatgaagagtgtgctcagggcttatttggaaccggatgtttggggattattttacactgaatgcaatccctgattgttgagggcagtttagcactacccaggctgaattactgcaggtgcacttgttcacatcttgaaagtacaaagaaagatggggcacacagaacttatgaggaaggaggcggtttatttgctttttctgaaatgataaaaggtatttagtgggttaagatggtcctgctttctccttgtggacttaggctgcacataattgggacagttagtgctattccaccaaaatagtgggagaagtataaggactagataaggcatgtgcccaatctagaacgcatatttaaaatagttaatatctgtaccatgatcttgatttttatgatagaaatgagaagccaggctaaaaaataaaatcccgatttacatgttagtaattgttttcatgacaatagataaaaaaagcatttcattattcttgtacatgaacattttttattttcataaaaaacacataagtatagatggcacacccctttagtctcaccattctggagtcagaggtaggcagattgcttctcaatcctttcaaaacaacggtagcaagacaggagctcacatttgtaatcccaacaccaagaaggctgaggcaggatgaaacatgagatcaaggcctggactagttaaggagttctaggtcagtctgaactacaatgatgccctgtttcagaaaacaacaaactaaataaatacacagtgataacatg

SEQ ID NO: 4386 - DNA, 432 bp, Mesocricetus auratus; identical to SEQ ID NO: 744

SEQ ID NO: 4387 - DNA, 1378 bp, Cricetulus griseus
  misc_feature (344)..(366): n is a, c, g, or t
gcggctctggctccaccaccggttcacgcactggttcacgcaccggctcccgggccggctcccgccgtggcagctttgatgccactggctctggcttctccatgaccttctcgtcttcctcttactcttcctccgggtatggccgccgctacgcctcagggcctccagcctctttagggggtcctgagtccgcggtggcctgacccctctgcctgcaccctgccctcccgctctgcatgcggccaggctccctgtggaggcgctggggtcttttaacatgtaaaggtgtcttcctcccaagcggtgcctaaaatttaaccaaaaagaccagactaacacgttannnnnnnnnnnnnnnnnnnnnnnccagacagcctgtgtcttgggaaatggggctggcccaggcccagtgaccacttcaccactcccttgggtccccctaaccctaccacctgccactcaccactgctaggtgccttggagaatccagagctgggcactcagcctaccacgcctctctctcctgggaggattctatctgggaaaggcctccagacctctaagccaaccccgccggatgtctgcctgctggccctagctgctgaggggacctggggaacgatcctatgagcagacagctcttgggcctcttgaggcctctgtcctgagccagctgcgtctctccagtgtgtcgctgaattacctgcctattcatttgggtcttgctggcaaaggaaaggccccaagccagccatctcttccagcctgcccggagaggccccttccccgtgggaagatgaggcccggccctggccccagcctcccgcctggctcctgcagctgccattggagctatgcttttgtagctcaccggcccgtactcaccccccgcccgagacccgagcctctgcttcagcctccagcctcagctccccttgtaagtgccttctgtgtccctcttgtgccctaaagacccagacgcaggggtaggagatggactttgtggctgggcaagggcttggacggttcttcagatctgagacttcttctacccagaggccagtggctgctagcctgtggaaaccccctctgggtgctgctgcccacctctcttccagggagccttggcctctccgtggcccaaagacactggctggcccatctgtgcagacatcagcacccggccagtaccacctcccttcctgtccagccagcccctggccttggtggctcctacccctgcctccaccctctgagtgagctctgcatgttccactaacctcgagctggtggcaggtggagatgccaggcagaacactaacctgaccatgggcggagccccgcggtggccgcccctcaataaaagcaattccaacct

SEQ ID NO: 4388 - DNA, 600 bp, Phodopus sungorus
tgcaggcatcggaagccgcctcctggcaggtagcaccacaggtgccctggctgttgccgtggcccaacctacagatgtggtaaaggtccgcttccaggctcaggcccgggctggcggtggtaggagataccagagcactgtcgaagcctacaagaccattgcacgagaggagggaatccgaggcctctggaaagggacctctcccaatgttgcccgtaacgccattgtcaactgtgctgagctggtgacctatgatctcatcaaagatactctcctgaaggccaacctcatgacagatgacctcccttgccacttcacttctgcctttggggcgggtttctgcaccaccgtcatcgcctccccagtcgatgtggtcaagacgagatatatgaactctgccttgggccagtaccacagcgcaggccactgtgccctcaccatgctccggaaggaggggccccgagccttctacaaggggttcatgccttccttccttcgcttggggtcctggaacgtagtgatgtttgtcacctatgagcagctcaaaagggccctgatggctgcctacgagtcccgggaggcacctttctgagctcctcc

SEQ ID NO: 4389 - DNA, 600 bp, Phodopus sungorus
  misc_feature (286)..(299): n is a, c, g, or t
  misc_feature (302)..(314): n is a, c, g, or t
cagttctacacccccaaaggagctgaccactccagcatcgccatcaggattctggcaggctgtaccacaggagccatggcagtgacctgtgcccagcccacagatgtggtgaaggtccgatttcaagccatgatacgtctgggaactggaggagagaggaaatacaaagggactatggatgcctacagaaccatcgccagggaggaaggaatcaggggcttatggaaagggacttggcccaacatcacgagaaacgccattgtcaactgtgctgagatggtgaccnnnnnnnnnnnnnnggnnnnnnnnnnnnnactctcacctgttcactgacaatttcccctgtcactttgtctctgcctttggagccggcttttgtgccacagtggtggcctccccagtggatgtggtaaagaccaggtacatgaacgctcccccaggcagatacctcagccctctccactgtatgctgaagatggtggcacaggagggccccacggccttctacaaaggatttgtgccttccttcctgcgtttgggagcctggaatgtgatgatgtttgtaacttatgaacagctgaaacgggccctggaaagtaa

SEQ ID NO: 4390 - DNA, 290 bp, Mesocricetus auratus; identical to SEQ ID NO: 748

SEQ ID NO: 4391 - DNA, 1374 bp, Cricetulus griseus
  misc_feature (327)..(344): n is a, c, g, or t
ctagaccccaccactcccaagttagcagttgatccaccagggtgtgcctctctagagaacactgaccataaagcttcttccctcggacagacgcctccagcacagcactcagagggttccttgtgtaaaggggacagtgatgactgtgggagtcgtcccagggagtgcactaccaacttggaaggctgggactcggtacctgatgaagcctatgacctgcttgacaaacttctggatctaaacccagcttcaaggataacagcagaggcagccttattgcatccattctttaaagatatgagctcctgaggtggttttccatttacnnnnnnnnnnnnnnnnnntgaggtggggtagataatcacaggttcttgtttgcatccaagtccagggaaggatgactaacttatttttaaagttacaatattttgctctgatgtcagattgtaagcagatggggaattattcaagatccagggggaggcctctatgtgatcttagagttaaaccaccaagtatagtcagatctttagttccctggttttctctgcttctggagcagccttagcctgatgcacgggtcaaggaacgggtcataaaggtcacagatgtgacagggagtaaatgagtgaaaaagactgtttccagatgtctgtggcctacgctgtgtatgcctggggaactggctcttggtggtgtacaggagagacagtgatctttcctataggtgtgcatataaacacagttaccgcagggacataggggaaatgacaccactcaatatagttgtttcctgtaagttacacagtgcttactgcagagtttctggttcttcattaggtgtatttatttatattgggaacctaataatgtgcagattgttgacgaggcagaagtctttttctcgtacagctattttgtcacactatcttagtttaattaggtaattgccacaaggaaaggtgagggtacaactgggaacattactgggttttgtcttccaggagtacccagacttctgcatttctgacctaagttgaccttgctcagagagtaatggtcattgcagtctcaggtggattgggaggaaatacaatgacgtagacaaagcagcaaagggcttgcacggccatctatgcattttttacattctgaactgccctgtgtttgtgatagaatgccagggttcccaggggtcaggaggataaacttgctgaagagttcccttcgtataatcacaggtcatcagtatattcactttcctgttttgaatcctgatagatcaatgtgtgtacacactttgtcttatgctgtatttttttaagcttgaatgtttttggaatatgtatttaataaatgtttcctttcagattc

SEQ ID NO: 4392 - DNA, 591 bp, Cricetulus griseus; identical to SEQ ID NO: 750
  misc_feature (497)..(515): n is a, c, g, or t

SEQ ID NO: 4393 - DNA, 600 bp, Cricetulus griseus
tgagaggaacaatgtctcccgaggttgaggatctgaatcttctgcgttgctcgaggtctggaagaacggggaggttggcactccctgacgcaggcgctcaccagcagcctaactctgtttggggacccttaccgtagtattcgaggccctggatggacgggacatcagatacgcgcagagccaatggttatggactagagagtcacggattgggcggggctaaaaggggcggggcttaggataaggggcggtgacgagtagagggggcggagccacagggctgaggggcgggacgcgcgatagtgccaaactagggtgagagtgcgaagatggcagctgctgaggagccaaagcccaaaaagctgaaggtggaagcgccacaagcgctgaggtgagagccgccaacgtggggaggagggagacggcatttgcggcgagccaaggcccacgtgggctggcgctgctgcgtggtgtttgcgttcgtggggccaacacgcgggacctgcagctcggggagttgccctcgtggctgcacattgaccccttggtttgaaccgtgctcaggtgctttcccggccctggcagccattgaccaatcag

SEQ ID NO: 4394 - DNA, 469 bp, Cricetulus griseus; identical to SEQ ID NO: 752

SEQ ID NO: 4395 - DNA, 312 bp, Cricetulus griseus; identical to SEQ ID NO: 753

SEQ ID NO: 4396 - DNA, 433 bp, Cricetulus griseus; identical to SEQ ID NO: 754

SEQ ID NO: 4397 - DNA, 269 bp, Cricetulus griseus; identical to SEQ ID NO: 755

SEQ ID NO: 4398 - DNA, 600 bp, Cricetulus griseus
  misc_feature (476)..(509): n is a, c, g, or t
actgattatgaattttttcactctattaatagactaaagacattaaagagatagccaaaaaggcacaggctcttgcaaaggtgaactcgaagaggccgaggaccgtggtcttcacacaagggagagacgacactgtagtggctacaggtactgttggaactatgtgaaaaatccagtgctaaggagattaatcatgacaaattctatagtctttctatcacgtgtcttttacagtttaactatattcctctcctttcaagattacaatttacgtttattgatgtagcttgtttacttttaaagtttggggggatttttttagcccagaaatatctttcttttcaaacataatacgttttacatataaacatttattcagttatgagcaagtaaagtccaaaatgtttcttctgattttctttcctgtcattattaatttgtcttgtttttgcaatagtaggaatttattatttttnnnnnnnnnnnnnnnnnnnnnnnnnnnnnnnnnntcctggatctcactatgtacatgaagctagcctccacctcacagagattcacccacccctatctcatgcccagcctaatgctgaaaagctt

SEQ ID NO: 4399 - DNA, 1122 bp, Cricetulus griseus; identical to SEQ ID NO: 757
  misc_feature (78)..(94): n is a, c, g, or t

SEQ ID NO: 4400 - DNA, 77 bp, Mesocricetus auratus; identical to SEQ ID NO: 758

SEQ ID NO: 4401 - DNA, 534 bp, Mesocricetus auratus; identical to SEQ ID NO: 759

SEQ ID NO: 4402 - DNA, 507 bp, Mesocricetus auratus; identical to SEQ ID NO: 760
  misc_feature (26)..(26): n is a, c, g, or t
  misc_feature (173)..(204): n is a, c, g, or t

SEQ ID NO: 4403 - DNA, 379 bp, Mesocricetus auratus; identical to SEQ ID NO: 761
  misc_feature (148)..(209): n is a, c, g, or t

SEQ ID NO: 4404 - DNA, 285 bp, Mesocricetus auratus; identical to SEQ ID NO: 762

SEQ ID NO: 4405 - DNA, 1400 bp, Cricetulus griseus
  misc_feature (1003)..(1027): n is a, c, g, or t
  misc_feature (1284)..(1325): n is a, c, g, or t
gggccgtatccgctggcgcgctggagcctgggtccgctacagcggctcaccggcgcctcaagtacatatccttagctgtgctggtggtccagaacgcctccctcatccttagcatccgatatgctcgtacactgcctggtgatcgcttctttgccaccaccgctgtggtcatggctgaagtgcttaaaggtgtcacctgtctcctgctgctcttcgcccagaagaggggtaatgtgaagcacctggttctcttcctccacgaggctgtcctggtgcaatatgtggacacactcaagctcgcggtgccctctctcatctatactttgcagaataacctccagtatgttgccatctccaacctgccagctgccactttccaggtgacatatcagctcaagatcctgactacagcactgttctccgtgctcatgttgaaccgcagcctctcacgcctgcagtgggcctccctgctgctgctcttcactggtgtggcgattgtccaggcacagcaagctggtgggggtggcccacggccactagatcagaatcccggggccggactagcagctgtggtggcctcctgtctctcctcaggctttgcaggggtatactttgagaagatcctcaaaggcagctcaggttctgtgtggctgcgtaacctccaactaggcctctttggcacagcactgggcctggtggggctctggtgggctgaaggcactgctgtggcccgtcgaggcttcttctttggatacacgcctgctgtctggggggtggtactaaaccaagcctttggtgggctactggtggctgttgtagtcaagtacgctgacaacatcctcaagggctttgccacctccctgtctattgtgctgtccactgttgcctccattcgcctctttggctttcacctggacccattatttgccctgggcgctgggctcgtcattggtgccgtctacctctacagccttccccgaagtgcagtcaaagccataacttnnnnnnnnnnnnnnnnnnnnnnnnntgggccctgcattcaccagcagcctcctgggcagccaccaccaccaccgcagctgtcttctcgaggagacctcatcacggagccctttctgccaaagttgctcaccaaggtgaagggttcgtagctgctggaattgaagacactggcctgccttcgttctccctctcttgccctggcccagctgggactaaactcttatcagtattaggggtagggtgagggagacatgggaattgcctgtcccaccaaccctgccnnnnnnnnnnnnnnnnnnnnnnnnnnnnnnnnnnnnnnnnnnctgaactcctgctatctttgcagtatttcttaggtaagtttctgcaaataaaatgtattttgcatcttgaaaaaa

SEQ ID NO: 4406 - DNA, 517 bp, Mesocricetus auratus; identical to SEQ ID NO: 764

SEQ ID NO: 4407 - DNA, 600 bp, Cricetulus griseus
ggagacaagcactgggtgtttgacgaggcttccctggaacctgggtaccccaagcacattaaggagctaggccgaggactacctactgacaagattgatgcagctctcttctggatgcccaatggaaagacctatttcttcaggggaaataagtactaccgtttcaatgaggagttcagggccgtggacagcgagtaccctaaaaacatcaaagtctgggaaggaatccctgagtctcccagagggtcgttcatgggtagtgacgaagtcttcacatacttctacaaggggaacaaatactggaaattcaacaaccagaagctgaaagtagagcccgggtaccccaagtcggctctgcgggactggatgggctgcccttcagggggccgacctgatgaggggactgaggaggaaacagaggtgatcattatcgaggtggacgaggagggcggcggagctgtgaatgccgccgctgtcctactgcccgtgctgctgctggtgctggtgctggtggtaggccttgcagttttcttcttcagacgccatgggacccccaagagactgctttactgccagcgttcactgctggacaaggtctga

SEQ ID NO: 4408 - DNA, 1400 bp, Cricetulus griseus
  misc_feature (1050)..(1090): n is a, c, g, or t
  misc_feature (1128)..(1144): n is a, c, g, or t
  misc_feature (1146)..(1175): n is a, c, g, or t
aatgtgggtgtcagtgaggaggcttcagcaactatggggcctctggtaggagatcagtatttattcctggtgtacgatggactttgggagcctattctacatggaaggatgctctttctgcctggacacattcagggagggcctaggccctgcccttgatgatatgacagactttgggaatcccttatggagggcctcatgctccctggggagccgaggggggatggcatgaggattagtgggggtcaggggaggagggaaaggagagggagctgggattggcatgtgaagcaggcttgtttccaatttaaattaaaaaatataaaatataaaatatggggagtggcatgtctattgtaagattattgaaaaaattatatataattcagctaaagagcctccatagtatctggattatttatggtggcatgtccttccatagcaaaaaaatgctaaaaccccagtggctgaataccatacaaatatagtttttgcacaaagtccagctcatagattttcattcagtggttcttcaggaccagcctcttcccatctcattgtattccattcagggttttaggacatttccttctagactgcagaggggaaaagagcctaaagacaacaccttggtggctttctttagcaagtccaggaactgaacacctcactcttgtcagcagtccatgaccttactcagccactcaactgcaaatgtaactgagatacccaatagaagagcatacctccatatcctaggcacagccattgcaatcaacactatatcagacattgttgattgtctcctgatgggcagcagcacactatcaaccacaagtttaatggcaatgcttttcttaacattgataaagtaaacaagtaatgaagaacaggaagagcaataagatataaaataaagaaaggacttggatgaaagggataaatattttaatgctgttgcaatggagttcagagccaatatgcagtattaaactaagagatttgattagtgttaaagagcacatctgactgttcattttcattttttcnnnnnnnnnnnnnnnnnnnnnnnnnnnnnnnnnnnnnnnnngagggttaggcttagggtgagggttagggttagggtgnnnnnnnnnnnnnnnnngnnnnnnnnnnnnnnnnnnnnnnnnnnnnnnccctactctgaaatatttgtaagatctcagtcaacatttagcctttcattctgttcttcttaagggctcgctctcctggttttttctttgttttcttttggttctgagtgtgtgatttgaaagagtcgggatgagatgagaggggagaaattctgttcatcctaagcatttctcaataaacaatattcttaggctgtgggtcacaacctcatatagaattgtgcc

SEQ ID NO: 4409 - DNA, 600 bp, Cricetulus griseus
atttggatttgtttcattttagcaagtcatcataatgaattttttaagagggttttaattctacttgctgtgtatttttcttgaatagagaacatttgtcttagaattttgtgaggtctgtaaccatatgtttttgcatatagtctcttatgtaaggagtttcagtgaaattttctttgttaatatcacctccagataaatctttaattaaaaggtttgaatctttattcagcagtgtgaaatgctttgataagaatttctaagcataattacttatagaaaatttgcatatggtgggaataatgttcaaagacctggaagacatttgtaaaatttgtacttcagtggagctacctaaatatataaaatataacttatgtagctcaagaagactatttttataactatgttttattttggaaaaaagcagatgttttattatctttcaggaagggaatgattttgcttaaaatgttatttcctatgatatatcactttatataaaatgtgtttaaagtaagaaaacatcttattaagactctagagatgttatatttggaaatgccacactggattaaaaagttataacttgctaagctt

SEQ ID NO: 4410 - DNA, 600 bp, Cricetulus griseus
taaggaggaaatttcttcattaatactataatttctgctggatgtattccagtcagttgatgaagtcttaatttgccctttaaaatgaaatcagaaatcttttctatatatgtctttaactttttattctgttttgtggcagaaatatccactccaatatggtctcttgcctctgcatcagaattccagaagtatattttttggatggcaagataaccagaatacagtctaaatcaaggtttatctgatctacatgcacatccaatattctgttttctacccattgtaattctttttctgcctttgcggataatatttgtggactgtttaggtccttaaaggccattgttaaaggctttaagtcatgaccttctaccccaataatcatctgaatttgagaaatttctcctagcaagcagcttctgaagacattatttgtaatagccagaacctggaagcaagctagatgcttctcaactgaagagtgaatagagaacatgtggtaccattttcacaatgcaagtactgctcatctggggaacaaaaactcaatgaaatcttaaaattcgaaagcaattggatggcactagaagaaacctt

SEQ ID NO: 4411 - DNA, 215 bp, Cricetulus griseus; identical to SEQ ID NO: 769

SEQ ID NO: 4412 - DNA, 205 bp, Cricetulus griseus; identical to SEQ ID NO: 770

SEQ ID NO: 4413 - DNA, 433 bp, Cricetulus griseus; identical to SEQ ID NO: 771
  misc_feature (397)..(397): n is a, c, g, or t

SEQ ID NO: 4414 - DNA, 204 bp, Cricetulus griseus; identical to SEQ ID NO: 772

SEQ ID NO: 4415 - DNA, 600 bp, Mesocricetus auratus
  misc_feature (464)..(482): n is a, c, g, or t
ggcttcaggtccagcccaaagacccctcccaggaggccagttcctgttgctgactgtgaaccacccccagtggataggaacctcaagccagacagaaaagccaagccggcacctctggaaataaagccgctgccggagtgggaagagctacaagccccggtcagatctcccatcaccaggagcttcgctcgggactcctctagattccccttgtcccctcgacctaactctgtgcacagcacgacatcgagcagcgactcccatgacagcgaagaaaactacgtccccatgaacccaaatctgtccagcgaagatccgaatctctttggcagtaacagccttgatggagggagcagctctatgatcaagcccaaaggagataaacaagtcgaatacttagatctagacctagattctgggaaatccacgccacctcggaagcaaaagaacagtggttcgggcannnnnnnnnnnnnnnnnnnggtggactacgtggtggtggaccagcagaaaactctggccctgaagagcactcgggaagcctggacggacgggaggcagtccacagagtcggaaactcccaccaagagcgtaaagtga

SEQ ID NO: 4416 - DNA, 600 bp, Mesocricetus auratus
  misc_feature (354)..(379): n is a, c, g, or t
cagctcaatctcactgtgatggccaaacccaccaactggatcgagggcacccaggcagtgcttcgagccaggaagggacaggatgacaaggtcgtggtggccacctgcacctcagccaatgggaagcctcccagtgtggtgtcctgggaaacacgactaaagggcgaggcagagtaccaggaaattcggaaccccaatggcacagtgacagtcatcagccgttaccgcttggtgcccagccgggaagcccaccggcagtccctggcttgcatcgtcaactatcacctggaccgcttcagggagagcctcacactcaacgtgcagtatgaacctgaggtgaccattgagggcttnnnnnnnnnnnnnnnnnnnnnnnnnncagatgtgaagcttacatgcaaagcggatgccaaccccccagccaccgagtaccactggaccacgttgaacggctctctccccaagggtgtggaggcccagaacagaaccctcttcttccgaggacccatcaactacagcctggcaggaacctacatctgtgaggccaccaaccccattggcacccgctcaggccaggtggaggtcaatatcacagaattc

SEQ ID NO: 4417 - DNA, 188 bp, Cricetulus griseus; identical to SEQ ID NO: 775

SEQ ID NO: 4418 - DNA, 91 bp, Cricetulus griseus
ttgctgtcatgaatgtagttcaccctgatgagccacaccctggcattggcaaacagctcacacagggcagagagggaaggagccaggacag

SEQ ID NO: 4419 - DNA, 208 bp, Cricetulus griseus; identical to SEQ ID NO: 777

SEQ ID NO: 4420 - DNA, 148 bp, Mesocricetus auratus; identical to SEQ ID NO: 778

SEQ ID NO: 4421 - DNA, 600 bp, Cricetulus griseus
aaccaggctggagacaccatgttcaatcgagctaagcttctcaacataggcttccaagaggccttgaaggaccatgactacaactgctttgtgttcagtgatgtggaccttattccaatggacgaccataatgcctacaggtgtttttcacagccccggcacatttctgttgcaatggacaagtttgggtttagcctgccttatgttcagtactttggaggcgtttctgccctcagtaaacaacagtttcttgccatcaatggatttcctaataattattggggctggggaggagaagatgatgacatttttaacagaatagttcataagggaatgtctatatcacgcccaaatgctgtagttggaagatgtcgcatgatacgacactcaagagacaagaaaaatgagcccaatcctcagaggtttgaccggattgctcacacaaaggaaactatgcgctttgatggtttgaactcacttacctaccaggtgttgaacgtagagagatacccattatataccaaaatcacagtggacatcgggacaccaagatagcattgtggaacaaataacagacctgaaaatggccaggggctcaga

SEQ ID NO: 4422 - DNA, 600 bp, Cricetulus griseus
acgcagtacacggtggacatagatgaccgctctggggactatgcctgcatcttccttcctgagcccgtgggcaggagcaacatcgttgtggaggggccacccaggatcaaggtcgggaagaagtcagaacattccagtgagggagaaaatgtgaggctgatctgcaagtctgagtcatctcacccccctgtcactgagtggtcctggtttaagacctctgactctggggaccagctgatcaccaacagctctgagagcaagtacgtcgtgatatccacagctgacagatcagagctgaccatcagcaaccttgacataaatagtgaccctggtacctacatgtgtaacgccaccaacacccagggcagtgtccaggagataatgacactgcgtgtgcgaagccgcctagcagccctctggcccttcctgggcatcgtggctgaggtcctggtgttggtcactatcatcttcatttatgagaagcgacggaagccggaccagaccctggacgaggatgaccctggtgccgccccactgaagggcagtggtcatcacatgaacgacaaggacaagaatgtacgccagaggaacgccacctga

SEQ ID NO: 4423 - DNA, 600 bp, Phodopus sungorus
tggccaatataatgaaggaaataagccttctcccagacaatctcctcaggacgccatcagtacagttggtacaaagttggtatatccagagtcttcaggagctgcttgattttaaggacaaaagtgctgaagatgctaaaactatttatgaatttacagacacagtgataaggatcagaaaccggcacaatgatgtcattccaaccatggcccagggtgtgaccgaatacaaggagagcttcggggtggatcctgtcaccagtcaaaatgtccagtactttttggatcgattctacatgagtcgcatttcaattagaatgttactcaaccagcactctttattgtttggtggaaaaggaagcccatcttatcgaaaacacattggaagcataaatccaaactgcgatgtagtcgaagtcattaaagatggctatgaaaatgctaggcggctttgtgatttgtattatgttaactctcctgaactagaacttgaagaactaaatgcggtctcaccaggacagacaatacaagtggtttatgttccatcccatctctatcacatggtgtttgaactgttcaagaacgcaatgagggccacca

SEQ ID NO: 4424 - DNA, 547 bp, Phodopus sungorus; identical to SEQ ID NO: 782
  misc_feature (320)..(345): n is a, c, g, or t

SEQ ID NO: 4425 - DNA, 482 bp, Phodopus sungorus; identical to SEQ ID NO: 783

SEQ ID NO: 4426 - DNA, 1400 bp, Mesocricetus auratus
ccagtattacaagagacccataggggtcctgtttaagagttcagaagcttggaagaaagatagacttgtcctaaaccaggaagtgatggcacctgaagccatcaagaacttcgtgcccctgctggaaggtgtagttcaggacttcatcaacgtcttgcacagacgcatcaagcagcagaagtctggaaatttctcaggggacatcagcgatgacctgttccgctttgcctttgagtccatcaccagtgttgtatttggggagcgcctggggatgttggaggagattgtggaccctgagtcccagcggttcatcgatgccatctaccagatgttccacaccagtgtccccatgctcaacctgcctccagaactttttcgattcttcagaactaagacctggaaggagcatgcagctgcctgggatatgattttcaaaaaagctgatgattatacacagaccttctactgggacttaagacagaagcaagagttcagcaagtaccctggtgtcctttacagcctcctgggtggcaacaagctgcccttcaagaacatccaggccaacattacggagatgctggcaggaggcgtagacacgacctccatgaccctgcagtggagcctttatgagatggcacacaacttgaaggtacaggagatgctgcgggcagaggttctggctgcccggcgtcaggcccagggagacatggtcaagatggtgcagttggtcccactcctaaaagccagcatcaaggagacactgagactccaccccatctctgtgaccgtacagaggtatcttgtggatgacctggtacttcgaaattacaggattcctgccaagatgttggtgcaggtggctaactatgccatgggccgagaacccagcttcttccccaacccaaacaagtttgacccaactcgttggctggaaaaaagcaaaaataccacccacttccgttacttgagctttggctggggtgttcgtcagtgtctgggccggcggattgcagagctggagatgaccatcttcctcatcaatgtgctggagaactttagaattgaactccaaagtctccatgatgtggggaccaagttcaacctcatcctgatgcctgagaagcccatcctcttcaacctccagcctctcaagaaggaccttgggacaaccacgaacagatagggtggcactgtctgaacttcagactggagtcacatggggagatggcccagtgggggcatttgggtgggtgtctctgtatctccagaaaaacctgctcctttggggtggttcttagctctcagtggccaactgcttaggttagccaggccctcctctccttcatcctctctcctttacttaccctgaaggttaataaacacatgaactctgaaaaaaa

SEQ ID NO: 4427 - DNA, 537 bp, Cricetulus griseus
gtggaaagtgttggagatattaaatcatgttgccatttattctcttttccacgctgcttcctctcatatttactgaatctgaacagcaactgtggttctgcaactcctccgatgcaactttttcctacagttactgtgatagcatgaagttccctttttcgattactgctgaaccctgtataacattgaagggaaccaatggatttttacatattaagttcatcccaaggagagacttaaaaaaattatatttcaacctctccatcaatgtcaactccatagaggtgccaactcgaaaagaaattatttgccacggatatgatgacaattattctttctgcaaagctctgaaaggagagactgtgaatacagtagtaccattttccttcaagggaatactatttcctaagggccaatacagatgtgttgcagaagccattgtaggggataatgaagaaaagttattttgtttgaattttaccatcattcaccaccctaatgtcaattagaataaattaagaatatatgtttttattt

SEQ ID NO: 4428 - DNA, 311 bp, Mesocricetus auratus; identical to SEQ ID NO: 786

SEQ ID NO: 4429 - DNA, 600 bp, Cricetulus griseus
ccgatgacccactctgcatgatcacagaatacatggaaaatggagatctcaatcagtttctttcccgccacgagcctctgagttcttgttccagcaatgccacggtcagttatgtcaacctgaagtttatggctacccagattgcctctggtatgaagtatctctcatcccttaactttgtccaccgagatctggccactcgaaactgcttagcgggcaagaactacaccatcaagatagctgactttggaatgagcagaaacctgtacagtggtgactactaccggatccagggccgggcagtgctccctatccgctggatgtcctgggaaagcatcttgctaggcaaattcaccacagcaggtgatgtgtgggcctttggggtgactctgtgggaaactttcaccttttgccaggagcagccctattcccagctgtcagatgagcaggttattgagaatactggagagttcttccgagaccaagggaggcagacttatctccctcaaccagctatttgccccgactctgtgtataagctgatgctcagctgttggagaagagagaccaagcaccggccatcattccaagaaatacacc

SEQ ID NO: 4430 - DNA, 1400 bp, Mesocricetus auratus
  misc_feature (1171)..(1203): n is a, c, g, or t
ctgtcgattgtgctgtccactgttgcctccattcgcctctttggcttccacctggacccattatttgccctgggcgctgggctcgtcattggtgccgtctacctctacagccttccccgaggtgcagtccaagccataacttctgcttctgcctctgcctccgggccctgcattcaccagcagcctcctgggcagccaccaccaccgcagctgtcttctcgaggagacctcatcacggagcccttcctgccaaagtcagtgctggtgaagtgagagctggtggtggttgggagagctggggcggggggtgggggttgggtttgaggggggttagcttctgctggtccagaagttgttgccaggcctgacttgtggggttggagggcttttttttttctcccacacttctagagggatatggaagtagggctgaatgtcacatgaacccttcctggtagatggactcccctctcctgaaggagctgcttcctttgccccaggctatcctctttgggaacagggttggggtaccgctattcccggctttccctcgtgaccctctgctggaaatgtcctgtctctcatgcctgggacagttcatcccagccatcctacagactggacaaaagcccagcagttcttcagtaacgactaatgactactcgtggggttccatttcctattgtatgaggccttctctcgtgcaccattaccctggatcatgtcaacagcttgggctctgctgtggctttggggcagtttccctggtacagagacccttgaagatcggccttttgtaagtgcctggagtgaggacagaggcacaagctgagaattgggcagcagttcatcttggggaaggtgcaataagcaccgttcactttttaatagttggggcatttgtgataatcagattaatgatccagagtgttgggaaaatgggaaggggagatctttgaagtgactgaatcttgtgtaattgaagagacagaaatgaaggattatcttctgggacatccagagaggaaaaataaagctgccaatgcactttcacagccccattggctgtttaaacacccttacttcatggcgggtatcagaattgatgaattgtggaacctgcacccctgcgctccccaaagcttactaactccttaactgtatccaagannnnnnnnnnnnnnnnnnnnnnnnnnnnnnnnngcgtgtgtatgtgtgtgtgcgcgcacacataaatacacgcatggaaggtgcctgggctgtctttgctatatgtaaataggaccattggatctttatttttgattaatttgttctgatttgggggggtgttgttttctaaggaactgtaatgaacatgtcaggatacccaatgccaaataaagatgttgtatttattt

SEQ ID NO: 4431 - DNA, 600 bp, Cricetulus longicaudatus
cctggagctgtggtgatgccccaggctgcttcactgtatgctatgatcgtggagttcagggatttgtggcggatccggagcccttgtggtgactgcgaaggttttgacgtgcacatcatggatgatatgattaagcactccctggattttcgagagagcagagaggcagaaccccacccattgtgggagtacccctgccgcagcctttctgagcctcagcagattctgacctttgatttccagcagcctgtgccccagaagcctgtgcatgctgagggctccatggaactgagaagacctgggaagagccatggtgctgtcctgtggatggaatatcatctgactccagacagcacagtcagcaccggcctcatgaatcctttggaagacaagggggactgctgctggaacccccactgcaagcaagctgtgtacttcctcagcaccacagtggatcccagagtgcctctggatggccctcagtctgtcagctatgctgtggagtttcatcccctcactggagacatcaccatggagtttaggcttgcagacaccttgaactaattccctcattgagaaattaaatggccaataggctgc

SEQ ID NO: 4432 - DNA, 471 bp, Mesocricetus auratus; identical to SEQ ID NO: 790

SEQ ID NO: 4433 - DNA, 387 bp, Mesocricetus auratus; identical to SEQ ID NO: 791

SEQ ID NO: 4434 - DNA, 600 bp, Cricetulus griseus
tcctatatctctgccaatgtcactggcttcaaatgtgtgacgggaatgtcttgtttaatgaggaaggatgtgctagatcaggccggagggctgatagcctttgctcagtacattgctgaagattactttatggccaaagcaatagctgaccgaggttggcggtttgcaatgtctactcaagttgccatgcaaaactctggttcatactcaatttctcagtttcaatccagaatgatcaggtggaccaaattgagaattaacatgcttcctgctacaataatttgtgagccaatttcagaatgctttgttgccagtttaattattgggtgggcagcccaccatgtgttcagatgggatatcatggtcttcttcatgtgccattgcctagcatggtttatatttgactacattcaactaaggggtgtccagggtggcacactgtgtttttcaaaacttgattatgctgtggcttggttcatccgagaatccatgacaatatacattttcttgtcggcattatgggaccctactataagctggagaactggtcgctacaggttgcgttgtggaggaacagcagaggaaatcctagatgtataa

SEQ ID NO: 4435 - DNA, 600 bp, Mesocricetus auratus
gttctgtcactgattcagaaacttcttagcgagagccctttcagctgtgatgatctacctgaaggtgaaaataagcgttctgatcctagatcaagcaaaactggtcccatggccaagagacctgaagatcaatgcccagacagttcagaacaggacttcatcagtgggatgaagcaaatgaaccgccaatttatagaccaactggtagaatccgtgatgaaactgtgcctgatcatggctaagtatagcaacaatggagcagccctggcagagctggaagaacaagcagccatggcaggtggtagctccagatgcggccgtgaaggtgcaatgtcacagtatcaagatgctcctggccctgaagttattgtcaacaatcagtgctctacaagtaacttgcagaagcagctgcaggctgtcctgcaatggattgcagcctctcagtttaacgtgcccatgctctacttcatgggagatgacgatggacaactagagaagctccctgaagtttcagccaaggcagcagagaaagggtacagtgtcggcgatcttcttcaggaggtcatgaagttcgccaaagaacgacaaatggatgaagcc

SEQ ID NO: 4436 - DNA, 600 bp, Cricetulus griseus
  misc_feature (82)..(116): n is a, c, g, or t
cctgttgtgcaaagatttgcagttcacctacttgctggggcaccgtctgaaggctccgaggccctcaagcctgagctgagcnnnnnnnnnnnnnnnnnnnnnnnnnnnnnnnnnnncatggcagcaatgacattcaaccctcctgttgaaccttcaaactccaaaaagaaggataaacttttacaaggggactcatttttgaatgaagatttaaatcaactaatcaaaagatattgcaatgaagttactactgagataccactggatttcaccaaatgtttgaaaacatctgtacagtagtacaaaggtgaagagtcagtggactgtcttatatatctgtatgtgtctgtgcagctacacgagggcctttttctttgtgttgaaggaaaacttcctaaggatgactataggatgactgaagcagagcccacagaagacactgctgttggtttgctgtttatggcttgcttttatgtacagccccggccaacttgctcaggagtggcactgtccactatgggctgggccctaccacattagtcactaattctataaatgccctacagacatgcccacaggcaagtctgatggaggcagcaa

SEQ ID NO: 4437 - DNA, 1379 bp, Cricetulus griseus
aaagcagagagccatccagtcggatcgggaaaatacaagcaaatttagcaattaatccagcagccttgctgcccacggcagctctgcagatcccaggaacaaagcctgctttatgtgaattagcttttccttcatctgaacctggaaggagccatggcccggaaagcgtgccgactcttgctgggagtgaggaggctggtgtgagcttcgatcttccagcccaggcagataccttacacagtgcaaacaagagtcgtgttaaagtgagaggaaagcgtaggccacagacccgcgctgctaggcggctggctgcccaggagtccagtgagagtgaggatatgagtgtctccagaggacctgttgcacagttggccagtagtcccatcttaccaaatggccatcaacctcatctgcagcccaggatggccagtggagagatcagctctgagaaagccatggccccagctgctccaccttgggaaagtggtcctgcattgtctgcagtggacagaagcttttttgtggcgtctctgcctcagactggaaatgaggctgacctttttgattctggggacatctttccaaagagcataggatcacagtccatggagggaacaaaagtcaaggcagcagagaccccagcccacttgtcaggaggaagtaaagagaagagcctcgtgttccctgctctcagtgaggccagcagtactgacgatctcttccagactgtcaaaccaagaccagcaaagaaaaggaacccttttcccctccttgaagatgaggatgatctctttgcagatcggaaaggaaaaaagaatgagttgaaatctgacagccatcaggacattatatcaaaaacacaagacatttttgaggatgatatatttgctacggaagctgtgaaaccttttcaaaaaaagagagagaaggagagaactttggaacccaacttatttgatgataatatcgatatctttgctgacttaaatgtaaaacccaaagaaaagtccaaaaagaaagtggaggccaagtctgtgtttgatgatgacacagatgatattttctcctctggtctccaggctaagaagtccaaacccaaaagccaatctgcagaggccacatctgaactaagatctgatcacaaagtgtccaacatttttgatgaccccctgaatgcctttggaagccagtagagcatatggggtcttcatagttcatcttaccattctatttccagttagtgatgctgtcttctacactctgtcttcactggattccaaaagcaaatactgaaacaactagttcaactgttactcaatgtaactaatatttttctgcactgactttatgcttaaggttacaaataaaatacatgcttc

SEQ ID NO: 4438 - DNA, 156 bp, Cricetulus griseus; identical to SEQ ID NO: 796

SEQ ID NO: 4439 - DNA, 266 bp, Cricetulus griseus
cagttttatccggtaaagtgaatgattagaggtcttggggccgaaacgatctcaacctattctcaaactttaaatgggtaagaagcccggctcgctggcgtggagccgggcgtggaatgcgagtgcctagtgggccacttttggtaagcagaactggcgctgcgggatgaaccgaacgccgggttaaggcgcccgatgccgacgctcatcagaccccagaaaaggtgttggtcgatatagacagcaggacggtggccatggaagtc

SEQ ID NO: 4440 - DNA, 507 bp, Mesocricetus auratus; identical to SEQ ID NO: 798

SEQ ID NO: 4441 - DNA, 600 bp, Mesocricetus auratus
  misc_feature (106)..(124): n is a, c, g, or t
  misc_feature (501)..(515): n is a, c, g, or t
aaggtcacctacaaagctccagttccaacagggggagtttattttgctgactcctttgatagagggtctctatcagggtggattttatctaaagccaaaaaagatnnnnnnnnnnnnnnnnnnnccaaatatgatggaaagtgggaggtagatgaaatgaaggacacaaagcttccaggtgataaaggacttgtactgatgtctcgagccaagcatcatgccatctctgctaaactgaacaagcccttcctgtttgacaccaagcctctcatcgttcagtatgaggttaattttcagaatggaatagaatgtggtggtgcctatgtgaagctgctttccaagacctcagaactcaacttggatcaattccacgacaagactccccagccagatgtgaaggaagaagatgggaaggaagaagagaagaacaagggggatgaagaggaagaaggagaagagaagcttgaagagaaacagaaaagtgatgctgaagatgatggnnnnnnnnnnnnnnnagatgaggaagatagaaaacctactgcagaggaggatgaaatcttgaacagatcaccaagaaacagaaagccacgaagagagtga

SEQ ID NO: 4442 - DNA, 600 bp, Cricetulus griseus
  misc_feature (295)..(351): n is a, c, g, or t
aggaaagggaagccctgtacagtagggttttgtgacatgaacggcaaatgtgaaaaacgagttcaggatgtaattgagcgattttgggatttcattgaccaattgagcatcaacacttttgggaagtttttggcagacaacatcgtagggtccgtcctggttttctccttgatattctggattccattcagcattcttgtccactgtgtggataagaaactggacaagcagtatgaatccctgtctctgtttcatcacagtaacattgagatgctgagcagcatggattcggctnnnnnnnnnnnnnnnnnnnnnnnnnnnnnnnnnnnnnnnnnnnnnnnnnnnnnnnnnctgcagccagtctccatgatgccgccagtgtctgcggctccaaaactggaccaccagaggatggacaccatccaggaagaccctagcacagactcgcatgtggacgacgatggctttgagaaggacccctttcccaacagcagtgcagctgctaagtcttttgaggatctcacagaccaccccgtcaccaggagtgaaaaggcggcctccttcaagctgcagcgtcagagccgagtcgacagcaaagag

SEQ ID NO: 4443 - DNA, 306 bp, Mesocricetus auratus; identical to SEQ ID NO: 801

SEQ ID NO: 4444 - DNA, 328 bp, Mesocricetus auratus; identical to SEQ ID NO: 802

SEQ ID NO: 4445 - DNA, 600 bp, Cricetulus griseus
  misc_feature (299)..(331): n is a, c, g, or t
gttccagctgcaatagcaactatctttgcagaatagtggcatataagatgttattctttcataaaacaaaacccttagtgagtgagtttaaggtataaattacacaataaagttttaatgaactgtattttgtaaattaatcattaaaaggactattatccatttttagtgtaaaaataagtaatattctattttggtccaattaaagtgaggattgtagtatcttcactgtttttttcttctttttcatttgtatgtgtatgtgtgttcccatgtccatgcacttacatgtagaggannnnnnnnnnnnnnnnnnnnnnnnnnnnnnnnnccatgcatttttttatgtaggccagaagtcagtgaccttgatccccattccaccttaacgttttgagacaagctgggagggttgcccagcaagcccctaggattgtctcagctcccacctctgtagtcactgtcataagccactcactgtgcttggctttacatgagtgatggagatctacattcagatatctatgatcgagtagctgaaatttaccagctatgtgtctcccaagttcctcctccctgctttcctaagaaaaagaattc

SEQ ID NO: 4446 - DNA, 600 bp, Cricetulus griseus
catgaatgataacagacctgaatttctgcaccaggtttggaatgggtctgttccagagggatcaaagcctggaacatatgtgatgacggtcactgctattgatgcagatgacccaaatgccctaaatgggatgctgagatacaggatcctgtcccaggctccgagcacgccttcacctaacatgtttacaatcaacaatgagactggggatatcatcacggtggcagctggtctggatcgagagaaagtgcaacagtacacattaataattcaggccacagacatggaaggcaatcccacttacggcctttcaaacacagccacggcggtcatcacggtgacagacgtcaatgacaatcctccagagtttactgccatgacgttctacggcgaagtccctgagaacagagtggaagtcatcgtagccaacctaactgtcactgacaaagatcagccccacaccccggcttggaatgcagtgtacagaatcagcggtggagaccctacaggaagatttgccatccatacagaccccaacagcaacgatgggctcgtcactgtggtaaaaccaattgactttgaaacaaataggatgtttgt

SEQ ID NO: 4447 - DNA, 764 bp, Mesocricetus auratus; identical to SEQ ID NO: 805
  misc_feature (481)..(481): n is a, c, g, or t

SEQ ID NO: 4448 - DNA, 253 bp, Cricetinae gen. sp.; identical to SEQ ID NO: 806
  misc_feature (146)..(164): n is a, c, g, or t

SEQ ID NO: 4449 - DNA, 210 bp, Cricetinae gen. sp.; identical to SEQ ID NO: 807

SEQ ID NO: 4450 - DNA, 261 bp, Cricetinae gen. sp.; identical to SEQ ID NO: 808
  misc_feature (194)..(217): n is a, c, g, or t

SEQ ID NO: 4451 - DNA, 153 bp, Cricetinae gen. sp.; identical to SEQ ID NO: 809

SEQ ID NO: 4452 - DNA, 600 bp, Mesocricetus auratus
  misc_feature (514)..(542): n is a, c, g, or t
ttgttccttcttcatcgctaactacgtttaacaggtgagacagccccattaatgttccacaaatcagtataaagcagaagtcagaaatcagttttatatcatcccttgctaacctaatgacaacctacaccaaacacataaaatattaaaattaagcttagaggctattaaagttaaacgccttatttaattgtaacaacaaatacaaaagaaaatcatggaaaccagaccacaagatggctctgttacgcagtcatcgtggtgattcagaatacgtttatgttaaagctggccatgacagtgcattattataaccccagcactcagaagcaggcaaaagcagagcaggatggttacttagagtttgagaccaatttggtttacatagttagctccagattagccaagactactatgaaatctcctttttgtaactgaggaccaaacccaggaccttgttcttgataggcaagtgctctaccaatgagctaaatctccaacccaggatctaacnnnnnnnnnnnnnnnnnnnnnnnnnnnnnatgaatacaacatcctgcctctacatatgtctgcacgccaggagagggcaccagatct

SEQ ID NO: 4453 - DNA, 565 bp, Mesocricetus auratus
gttagatcctgggttggagatttagctcattggtagagcacttgcctatcaagaacaaggtcctgggtttggtcctcagttacaaaaaggagatttcatagtagtcttggctaatctggagctaactatgtaaaccaaattggtctcaaactctaagtaaccatcctgctctgcttttgcctgcttctgagtgctggggttataataatgcactgtcatggccagctttaacataaacgtattctgaatcaccacgatgactgcgtaacagagccatcttgtggtctggtttccatgattttcttttgtatttgttgttacaattaaataaggcgtttaactttaatagcctctaagcttaattttaatattttatgtgtttggtgtaggttgtcattaggttagcaagggatgatataaaactgatttctgacttctgctttatactgatttgtggaacattaatggggctgtctcacctgttaaacgtagttagcgatgaagaaggaacaatggtttttcatgagtcagataattgtctctcataacaaattaggcccaaggc

SEQ ID NO: 4454 - DNA, 600 bp, Mesocricetus auratus
gaagactagaggtgaccagtgactgtggcccagtaattagaactgtggtggcacaagtctggccccacatccacccaatccaaaactgataaggatattttgaaaaacaggaaagcagtacctgtctgatccagctctggtataggtaggagtgagtcctgaactgctggattacagactggcttgagccacagaagatgatggaccagagtaaagtatcatcacctgctcacaaggcatgcttcactagagaataattctaaagaggtgccatggaggcagcaggacaaggcacaagcagtctgggtgggggtcaagccagacctagtgccacagaacaagagagcaatctgtgactagtagttagggactttgtggatgggacaaggggcatgggggaagaaatgaaaatattcttccaattactttccagttctcctttagggacagcttagaattatttgcactattgagtcttcatgttcccacttaaaaacaaacagatgctctgaaagcaaactggcttgaaatggtgacactttgtcccacaagccaccaaatgtggcagtgtttagaactacctggatctgtatatacctg

SEQ ID NO: 4455 - DNA, 1400 bp, Cricetulus griseus
cagcatagacaacagtgacctgtcaggggagctggggggctgcaattcagaaagtggagtgcaggccagaggggaggttgagaatagcaagagtaaggaggattgcaccatgtcatgaggaggcagaggcagcaggcagacggggcgaccgagtttcagagagggccaaggactcaacacactaagcccaaccttaagaattctacccttcaactctactgcccaggttcacgaaatgttccagtttctgtgaacgtaccacgtgtcaatcaagtatcaacgactttaagttatagactgttacttgtagatttgtattcaaccattggtcatgtagacaccattgttttcagtttcagttctagctgagagcattccattagcatcaggtgacaccatgtcctgtcatgtctgcattccagtcttaagggcaaaacgtaaccatttgcttcaggccgggatgaatgttgactgtacttgaccaaatgtatcagcatctagttgaagtgaccaaacagcatgcttagatttctgtgtcttgagcagtgaatagtcaaactaccatgtctcattaaagtagatgtatcttcatgtttgatcttaatgtgtacgtcataacctgtgtggtattgtatttaaaggagttagatggataagtagcaggtaggtcactgggtgagaggaccagcacctcagggtagagattaattactgtagggattcaaacagttatcaaataacacagggagactacgtgcctttctttacctcgcctaagtgctgaattttgcaccaatgctcttggatcttattgccaatggtacccaaattaattttatccaagatctttatttcacttcacatgggtaatatgataaattcattttatacaaatattttatttttatccttttctgttaatgacaagttgaaattatatttcctactttagtgtttaggagaaagtcattaatttttttaactttaaagttatcttcctgtctgaatgtctacttattattaaaaaaaaaaacagtacaacacattgtttgttcttatgcaaaggactcattagacttgaatccaacattttgtgtttggtataaatatttttatttgttgtttctcagtattttctttttggaaagttattttacctgcctgaaggaaataatgtattttctatataaagaagcagttagaaaaaattatcataaagttgcattgaaaagtaattgcaaggccatgtactgtatgactactgttgacatgttacgggatcatgtgaattcatactactgctacaaggtagagtggaacgcaaaaagaccaaaccctcagtaaaatttgaggcaaactgaaatgtcatataattgaaataaaaacattttataatttta

SEQ ID NO: 4456 - DNA, 454 bp, Cricetulus griseus; identical to SEQ ID NO: 814

SEQ ID NO: 4457 - DNA, 600 bp, Mesocricetus auratus
ctgtttgtgtacaatcacttctgtatactctataatgagatatctaatgttacattcatgcactcttaaaacgactatgttcaaccatgttttaatttttgctttcatgctgccaaggtgagaacaggatggcaattatgcatcatattctcttgatcatggaatcagcatcacaaataaatcaccatttcattctacatgaattgtcccatctcctgtagagccaggataccacatatcaaattcctggcttagctttcctttcccatcacatgatgtattacctgttcttattttttgactgattaaataaattgtttcaagaaacaataaatgcctcgcaaaatgtatctcattcaaaaagcccataaatagtcactaagataattacaataatcactccggtgtaacaaatgatatccgcatcattacaaactattgtagtaattgaaatttcatcattcctggatagccatgggcaagaacagtgcagaagtgaagtttatgttgtgttccatatttactttcagttttaacttgagatttgcagttgaatggttctaacacactgaaataatttgtataacaaactctgtggtt

SEQ ID NO: 4458 - DNA, 600 bp, Cricetulus griseus
ctgacaagtatattaaggaaacaaacatcaaaaatgacccgattcaactcaacaatctcatcaagaaaaactgtgatgtggtgacatggaccccacgacctggagctactcttgacctgggcaggatgctgaaggacccaacagacagccagggcatcatagagcctccagaagggacaaaaatttacaaggattcatgggacttcggcccatacctgagcaccttgcactctgctgtaggagatgaaatcttccttcactcgtcctggataaaagagtacttcacttgggctggatttaagagttacaacttggtggtcaggatgattgaaacagatgaagacttcaacccttttcctggagggtatgactatctggtggactttctagatttgtcttttccaaaagaaagaccaagcagggagcatccctatgaagaaatccgtagccgtgtggatgtcgtcaggtacgtggtgaagcacggtctgctgtgggatgacctgtacattggcttccagacccggttgcagcgggaccctgacatataccatcatctgttttggaatcattttcagataaaactccctctaacaccaccca

SEQ ID NO: 4459 - DNA, 600 bp, Mesocricetus auratus
gtccttgccaacaagtctctcgggtcacgaattgacgactatgacattgtggtcagactgaattcagcgcctgtgaagggctttgagagggacgtgggcagcaagaccaccctgcgcatcacctatcctgagggtgccatgcagcgacccgagcagtacgaacgagactctctctttgtccttgcgggcttcaagtggcaggacttcaagtggctgaagtacatcgtctacaaggaaagagtgagtgcatccgatggcttctggaagtctgtggccactcgagtgcccaaggagcccccggaaatccgcatcctcaatccgtacttcatccaggaggccgccttcacgctcattggactgcccttcaacaacggcctcatgggcagggggaacatcccaacccttggcagtgtggcggtgaccatggcactacatggctgtgatgaagtggcagtcgcaggctttggctacgacatgaacacacccaatgcacccctacactactatgaggctgtgcgcatggcagccatcaaagagtcctggacgcacaacatccagcgagaaaaggagtttctacggaagctggtgaaagctcgcgtc

SEQ ID NO: 4460 - DNA, 600 bp, Mesocricetus auratus
  misc_feature (332)..(346): n is a, c, g, or t
gttgcggaacagttcactgggaagtatcatcaacaagtacgatgtggtcatcagattgaacaatgctcctgtggctggttacgaggcagatgtgggctctaaaaccaccatacgtctcttctaccctgagtcggcccacttcgaccccaaaatagaaaacaacccagacacgctcttggtcctggtagctttcaaggcaatggacttccactggattgaaaccatcttgagtgataagaagcgggtacggaaaggtttctggaaacagcctcccctcatctgggatgtcaaccctaaacagattcggattctcaaccccttctttatggagnnnnnnnnnnnnnnnctcctgagcctgcccatacagcagtcacgaaagatcaagcagaaaccaatgacaggtctgctagccatcaccttggccctccacctctgcgacctggtgcacatcgctggcttcggctacccagacgcctacaacaagaagcagaccatccactactatgaacagatcacgcttaagtctatggcggggtcagggcacaatgtctcccaagaggccctagccatcaagcggatgctagagatgggcgctgtgaa

SEQ ID NO: 4461 - DNA, 690 bp, Mesocricetus auratus; identical to SEQ ID NO: 819

SEQ ID NO: 4462 - DNA, 93 bp, Phodopus roborowski; identical to SEQ ID NO: 820

SEQ ID NO: 4463 - DNA, 93 bp, Mesocricetus auratus; identical to SEQ ID NO: 821

SEQ ID NO: 4464 - DNA, 390 bp, Mesocricetus auratus; identical to SEQ ID NO: 822

SEQ ID NO: 4465 - DNA, 489 bp, Cricetulus sp.; identical to SEQ ID NO: 823

SEQ ID NO: 4466 - DNA, 600 bp, Cricetus cricetus
  misc_feature (224)..(239): n is a, c, g, or t
cgagggtggactcaacagtgactatgtgcacctgtttgtggccacgctgcacttcccccacgcctccaacgtcaccctgtataaggaccagctacagatgtggattcgaggcaacgtgagtgcctgtgctcggtccatcttcatctttgacgagatggacaagatgcacgcaggccttattgacgccatcaagcctttcctagactattatgacgtggtagacnnnnnnnnnnnnnnnnaggccatcttcatcttcctcagcaacgccggggcagagaggatcacagatgtggctttggatttctggaaaagtgggaagcagagggaagaaatcaagcttagagacatggagcatgccctggccgtgtcggtcttcaataacaagaacagtggcttctggcacagcagcctcattgaccggaacctcattgattattttgtccccttcctgcccctggagtataagcacttgaaaatgtgtatcagagttgagatgcagtcccgtggctatgaagtagatgaggacattataagcaaggtggctgaagagatgacattcttccccaaggaggagagagtcttctctgacaagggctgcaa

SEQ ID NO: 4467 - DNA, 600 bp, Cricetulus griseus
  misc_feature (358)..(377): n is a, c, g, or t
cttggcccctagattagagaaaggggtctcctcccctttcccaagaaagcctcttctatgtgctcagcgatggggagcggggaacctaatattgctggcaagaaaaagaagtacctcaaggctgccctgtatgtgggtgacttgggccctgaagtgacagaggacatgctttataagaagttcagacctgctggccctctccgcttcactagaatttgccgtgacccagtgacccacagccccctgggttatggttatgttaacttccgctttcctgcagatgctgagtgggccttgaacacaatgaactttgatttaattaatggtaaaccgtttcgcctcatgtggtcacagccannnnnnnnnnnnnnnnnnnntggagttggaaatatattcatcaagcacttggataaatccatagataataggaccctgttttatttattttctgcttttgggaacattctttcctgtaaagtagtatgtgatgacaatggctctaagggttatgcctatgtccactttgatagccttgctgctgccaatagggctatctggcatatgaatggagtctggctcaacaaccgccaggtgtatgtc

SEQ ID NO: 4468 - DNA, 582 bp, Mesocricetus auratus
  misc_feature (171)..(197): n is a, c, g, or t
agctgctgctgctccacggagcggaacccaactgcgctgaccccaacactctaaccagacccgtgcacgatgcagctcgggagggcttcctggacaccctggtggtgctgcacagggcaggggcgcggctggatgtgcgggacacctggggccgcctgccggtggacctgnnnnnnnnnnnnnnnnnnnnnnnnnnngcagtctatctgcatgctgccactggggactgaacgacccgcaagtcttccaaaactccaagcctatgcaggaaggtaaagccaatgagaaataacttccgaagtgttttcctgcatctgggtctggatctggccctctattctcaccctgaagccaaagggatccccaatttgatttagtattgtgtgacgttctgggagccccttccttttcaggtgtaaaataacaagggaagttcttgaatctccacaacatgatggtgcagtgggaattggagaatgtgcttggtgactgacaatagggagggagcagtcagtacctccctccccctgtgacctccaaatgcagataatccacagtctagaaggaaaccctggagactag

SEQ ID NO: 4469 - DNA, 1311 bp, Cricetulus griseus
tgccagagcgcgtgggtccttgggtcaggtcaaagggtcgaaggtgcagcgcgtgacccaggatcctagcaggctcggagcaggagcatggcgtcgtcggggtcggtgcagcagccgcggctggtgctgctgatgctggtgctggctggcgcggcgcgggccagcctctacttccgtccgggccggacctgctaccacccccttcgcggggaccagattgcccagctggggcgcaggacttaccctcggccgcatgagtacctgtccccatcggatatccccaagaactgggattggagaaacgtgaagggtgtcaactacgccagcatcaccaggaaccagcacatcccacagtactgcggctcctgctgggctcacggcagcaccagtgccatggcagaccgcatcaacatcaagaggaaaggtgcgtggccctccaccctgctttccgtccagaacgtcatcgactgtggcaatgctggctcctgcgagggaggcaatgaccttccggtgtgggcatacgcccataagcatggtatccctgacgagacctgcaacaactaccaggccaaggaccaagactgtgacaagtttaaccagtgtgggacctgcaccgaattcaaagtgtgccacaccatccagaactacacccgctggagagtgggtgactacggctccctgtcgggtcgggagaagatgatggcagagatatacgccaatggtcccatcagctgcgggataatggtgaccgagaagatggataactacacaggaggcatctatgccgagctccaggagcagacctctatcaaccacatcgtctctgtggctggctggggtgtcagcagtgatggcattgagtactggattgtccgtaactcatggggtgaaccctggggtgagaggggctggatgaggatcgtgaccagcacctacaaaggaggcacgggtgccagctacaacctcgccattgaggaggcctgcacatatggggaccccattgtttaagtacacgtctctggaaacaatgttgtaaaccatgccagggatggatggggtgattaacactggacagctagaaacagtgcttgtggacatgacgaccagtgtggactgcagaagccatcccaagaagagatggtaaaggaggagcccacctccccgttgccctcaggatcagaggcctgccttcagccacctggggaagacagctatggtctacaacagttctgatctcaccctaggatcgatccatgggagagggtaacaattccaggatgcctaagtgatgaataaagtatccggattccc

SEQ ID NO: 4470 - DNA, 226 bp, Mesocricetus auratus; identical to SEQ ID NO: 828

SEQ ID NO: 4471 - DNA, 437 bp, Mesocricetus auratus; identical to SEQ ID NO: 829
  misc_feature (267)..(319): n is a, c, g, or t

SEQ ID NO: 4472 - DNA, 419 bp, Mesocricetus auratus; identical to SEQ ID NO: 830

SEQ ID NO: 4473 - DNA, 600 bp, Mesocricetus auratus
gtgcacgagtggcttcaccacaaagacaggaacctgggatttaagataagtttgcactgcccctgttgcaccttcgtgccatttaataataacatcatcccgaataaaagcgaagagctcgaagccagattcgcgggtattgatggcacctcccaacatagcagtggtcatcaggagactataaagtccactaggaagaaaaacagtgggaagacccctcatctcctgctaatgctgctgccctcctacagactggagtcacaacagtccaatcggcggaagaagcgtgctttggatgctgcctattgctttagaaatgtgcaggataattgctgcctccgccctctttacattgatttcaagagggatcttgggtggaaatggatccatgaacccaaagggtataatgccaacttctgtgctggggcatgcccgtatctgtggagttcagacactcagcacaccaaggtcctcagtttgtacaataccataaatccggaagcttctgcttctccttgctgtgtgtcccacgatctggagcctctcaccatcctctactacattggcaacacacccaagatcgaacaactttccaacatg

SEQ ID NO: 4474 - DNA, 600 bp, Mesocricetus auratus
agagtctgaggccatcaagagtttattgaaagcagttagccaaagaaggtctaaaagagcctcttaaccagagagaagccgatcaccgcagtgctgtagccgacggacaggcagcggaaagcccgtctctccatcacttctttatacgtcggcctatggctactcctaattgtccctggttcccctgaaaggtgaccagccatggtcacatcagctgctatccctagtgacatcaggtcactattctccaggacgatgggcagctcctcgtcctgagacaacagtaactccagtgacaagagtccccaactctactaagagctggtcctgagttctcatacagacagctgcaatgtttctcctggcgctgtactatataagctacgctgaggtgctacacttttagccttgtgccaagctctacctgctcctcaccctccccaccttaaagtgtgttagcagatctgtccagttctgagttacctgggttctttaatttcaaatacagtcgcaataagactaccacctgcctgctcctacggacaaactttacttcatggcttacagctaccttcccaaggaaacttcataactcagagt

SEQ ID NO: 4475 - DNA, 600 bp, Mesocricetus auratus
  misc_feature (352)..(366): n is a, c, g, or t
gtatgtgtgaatcctcaagccaaatggctccaaatagtgttaaaacttttacggagcaaaactatgtcttcaacggtcacagcgccagtgagtaagagaaggactacctctacctaaaggccctatccaccaaaggacacctgcaccctcctttattccctgctctgaattctagctgtgctcttagttgaagaatttccaagaaaataacttccttttgcaaacaaacatgactgtctgtaaggaaagccctgcaggagctgaaagggttaacccgagctcctttgcatactcaacctccattcttgtccaaggatgggagtttagttacaacccacttggcctgtgtttnnnnnnnnnnnnnnnctttaatgttaaaccgtcctaagttgtagaggaatggaaactcacatgtaaaacgtgaacctgtaccttgtattaacaagaaatatatggggtgtacatccatcgtttcacatgcttaggaaaagcagctttccagaagtttcctgggcagctgatgcagttccaacctaacacgatgcagagtgaaaagccccatgaagaaaatagagtcctacttttaaaggtttcttgtgt

SEQ ID NO: 4476 - DNA, 321 bp, Cricetulus griseus; identical to SEQ ID NO: 834
  misc_feature (201)..(201): n is a, c, g, or t

SEQ ID NO: 4477 - DNA, 561 bp, Cricetulus griseus; identical to SEQ ID NO: 835

SEQ ID NO: 4478 - DNA, 305 bp, Cricetulus griseus; identical to SEQ ID NO: 836

SEQ ID NO: 4479 - DNA, 600 bp, Cricetulus griseus
aaagacagccccaatgtgtttctgttcaaactgggtggggtcacggcctccttcacagcttctgtgggcagcctgttcctcacagccatcgacaggtacatatccattcacaggcctctggcctataagaggatcgtcaccaggcccaaggctgtagtggccttttgcctgatgtggactattgcaatagtaattgctgtgctgcctctccttggctggaactgcaagaagctacaatctgtttgctcggacattttcccactcatcgatgaaacctacctgatgttctggattggagtcaccagcgtgctgttgctgttcattgtgtatgcatacatgtacattctctggaaggctcacagccatgcagtccgcatgattcaacgtggaacccagaagagcatcataatccacacatcagaagatggcaaggtgcaggtgactcggccggaccaagctcgaatggacattaggctggccaaaaccctcgtcctgatcctggtggtgttgatcatctgctggggccctctgcttgcaatcatggtatatgatgtctttggaaagatgaataagctcatcaagacagtgtttgccttctgt

SEQ ID NO: 4480 - DNA, 298 bp, Cricetulus griseus; identical to SEQ ID NO: 838
  misc_feature (122)..(140): n is a, c, g, or t

SEQ ID NO: 4481 - DNA, 600 bp, Cricetulus griseus
gaacccaaacccaattctgaactgtgttgcaagccattgtgtcttatgctggcagatgagtccgatcacgagaccctgactgctatcctaagccccctcattgctgaaagggaagccatgaagagcagtgaattaatgcttgagatgggaggcatcctcaggactttcaagttcatcttcaggggcactggatatgatgaaaaacttgtccgggaagtagaaggcttggaagcctctggctcagtctacatctgtacactttgtgatgccactcgtctggaagcctctcaaaatcttgtcttccactccataaccagaagccatgctgagaacctggagcgctatgaggtttggcggtccaatccctatcacgagtcagtggaagaactccgggatcgggtgaaaggggtctctgccaaacctttcatcgaaacagtcccttccatagatgcactccactgtgatattggcaatgcggctgaattctataagattttccagctggagataggggaagtgtataaaaatcccaatgcctctaaagaggaaaggaagagatggcaggccacactggataaacatctccggaaaaggatgaac

SEQ ID NO: 4482 - DNA, 444 bp, Cricetulus griseus; identical to SEQ ID NO: 840

SEQ ID NO: 4483 - DNA, 426 bp, Cricetulus griseus; identical to SEQ ID NO: 841

SEQ ID NO: 4484 - DNA, 204 bp, Cricetulus griseus; identical to SEQ ID NO: 842

SEQ ID NO: 4485 - DNA, 97 bp, Phodopus sungorus; identical to SEQ ID NO: 843

SEQ ID NO: 4486 - DNA, 110 bp, Mesocricetus auratus; identical to SEQ ID NO: 844

SEQ ID NO: 4487 - DNA, 121 bp, Cricetulus griseus; identical to SEQ ID NO: 845
  misc_feature (95)..(96): n is a, c, g, or t

SEQ ID NO: 4488 - DNA, 459 bp, Mesocricetus auratus; identical to SEQ ID NO: 846
  misc_feature (87)..(113): n is a, c, g, or t

SEQ ID NO: 4489 - DNA, 600 bp, Cricetulus longicaudatus
ggctgcttagaatttccttatggtgtccttgctgcttctgccttgtatcatttctcctccatggaactgatgcagaaggtttcagggtatcagtggtgcgacatagagaaatgtgtcaagtggatggttccgttcgccatggccttccgggaggtgggaagctccaagctcaagcacttccggggagttcccatggaaaacgcccacaacatccagacccacgccaacagcttggatttgctggacaaagcccaggcaaagaaagccatattgtcagaacagaacaggatccctcctcctcccagtggggtcctgacacccccacccagcagtaagaagcagaacagtgaggaggagacagaatgagcaaacctgccaaagacagtgttgtggaagcagctgcctggagctcctttgctgcctaggaggttgggagcccctgctgatgctctgcggaaaggcgtatctcttccagagcagcgggcgtcttcaaaatggcctcggacagaagtgcttgtatggaatgctagttgttttaacaatagggttgaggacaccagccacctccagaacgccgctgagtgctccagaagctgctaa

SEQ ID NO: 4490 - DNA, 190 bp, Mesocricetus auratus; identical to SEQ ID NO: 848

SEQ ID NO: 4491 - DNA, 241 bp, Mesocricetus auratus; identical to SEQ ID NO: 849

SEQ ID NO: 4492 - DNA, 221 bp, Mesocricetus auratus; identical to SEQ ID NO: 850

SEQ ID NO: 4493 - DNA, 205 bp, Mesocricetus auratus; identical to SEQ ID NO: 851

SEQ ID NO: 4494 - DNA, 142 bp, Mesocricetus auratus; identical to SEQ ID NO: 852

SEQ ID NO: 4495 - DNA, 134 bp, Mesocricetus auratus
actgaggacaaaggcaaaatgtctagaagatgagcgcttaaggactgaagatgagttgtcaaaatacagggaaattatcaatcgtcagaaagctgagattcagaatttactggacagagtgaaagtggcagatc

SEQ ID NO: 4496 - DNA, 212 bp, Mesocricetus auratus; identical to SEQ ID NO: 854

SEQ ID NO: 4497 - DNA, 600 bp, Mesocricetus auratus
cttctttccagaatatacggagctgtgcgaaccccagggctactgtcctatgcaccaccaggaccaccaggctgagctgctgatgtggcgaaaccagagcaaagcccaggaaggggagcggcagctttcggagcagattgccctcctgatgaagaagggtgtgagcctcccatagtgggtggtggtggcgcacacctttaaccccagcacccgggaggcagaggtaggaggatctctgcgtttgaaatcagcctgtctacgacacagcaagttccaggacagccagagctacaaggaaaacatctcagaaaaacaaaaaacaatttctgtcaagtatggagcagatgcctgttgcctgtgtgcttgaaaggtggacctagaggacctgaagctcagttcaaggccagcctcagctcctggattccctagctcactaaatggaaacaaaaccgaaaggcatagtaaccattgctctggaaccaagggaaagtttcatttgtattcttgaactggtgttggtggtaaatgtttgtattcctaagaggtcatggcaggaagatgatgagttaaagaacaagataaagtctgtggtgcggccgc

SEQ ID NO: 4498 - DNA, 1400 bp, Mesocricetus auratus
  misc_feature (374)..(398): n is a, c, g, or t
  misc_feature (558)..(600): n is a, c, g, or t
  misc_feature (629)..(646): n is a, c, g, or t
  misc_feature (1078)..(1115): n is a, c, g, or t
tagaattcactgtgtcaccaggggagaaggtggacatgactcctatctatgggctgactttaaagcacgcccgctgcgaatacttccaagcgcagacacggtcctctgggcctcagcatccacaagcttagactgccctgtgtggtcaccagagcagggggctgttccagggatttaacttcactcagaaacacagactctgggcttgtgcttgcctcctgatttggtcttgcttctccgcatgctgatcacagacactgggcacagcagagacccactggaacatcagagtcttcccaagttcaccagcaactaggggggcctgaaagggaaaggaggtccctgggcctcagaaaactcctgcagagtccccnnnnnnnnnnnnnnnnnnnnnnnnngaaaaatgcttagagcatggtcatgccaggatctgtcaggcttagaggagctgtccagaatagagggagaagacatcttaaaatactgccacaggcctgtccacgtttgccaggcattggtggtgcacacctttaattccagcactggggaagcagacgnnnnnnnnnnnnnnnnnnnnnnnnnnnnnnnnnnnnnnnnnnncgagttccagaacagcctccaaaacaatnnnnnnnnnnnnnnnnnncaaaaaccaaaataaacatgctgccacagaagtgcttctgccatttactagggctggacagctttcccacatgggtctaggacgatgtctgtggtgatcacctttatttgtccagggtactcctgtccttgcaaaagcccccgttcctgctctggaagtgctgtgtcttgtgtctaggaagatccaagaacagagggacagactttctgggcagtaggaccaggtcaagagtaaagggatgactcttgagacaagagtcttgtgcagctcagattgcctctgagcctgctgtgtattgatcgtgaattacttacttttttaatgcttttactgacataccaagtgctaggatacagtcattggtctctcttctttactgtataaaatgttcatttaaaaaatgtttgtaccagctgggcggtggagatgcgnnnnnnnnnnnnnnnnnnnnnnnnnnnnnnnnnnnnnncgatttctctgagttcgagaccagcctggcctacaagaactagttctaggacaggcctccaaagccacagaaaaaccctgacttgaaaactccccccccccaccgcaaaaaataaatgtttgtacctaagaccttttattttggcccatattttgcttatgcatttgtattagtcatatcttaagagtttagatcaatgcatttactattacagagaaaaccctaactcaagtatccagaaatatataggaactacctacctgagctaaataaaatattacctgg

SEQ ID NO: 4499 - DNA, 600 bp, Mesocricetus auratus
ggtcctacctgttcctcttgcagaaagcagtggaaagacccctttgtgttccgtccagagcggtttcttactgataatgacacagtcatcaacaagactctgagtgagaaggtgatgctctttggcttgggaaagcgcaggtgcattggggagatcccggccaagtgggaagtcttcctcttcttagccatcctgctgcagcagctggagttcagcgtgccaccgggcacaaaggtggacctgacacctacctacgggctgaccatgaaacctcagacctgcaaatacatccaggcgtggccacgtttttccaaatgaagatggctgaggcaggggaggaggcatccatggggctgtcacctctgtttctttccctttctttttaaataacagcttttttttggagtacaattctttcaccaaataattcacctccaatcaaatagaatattgtctgtcatatacccccaaacctatacccattaagatttatgactattcatcctaacctgtctcccttgctccaccagatgctaatgtagtttttgactcgataaatttgcctactctagtcccatcacataaactcaatgatctatg

SEQ ID NO: 4500 - DNA, 600 bp, Mesocricetus auratus
gacagcgaaggtccagaaagagatcgatcatgtgattggcagagacaggagtccctgcatgcaggacaggacccgaatgccctacacagatgcaatggtgcatgaggttcagagatacgttaacctcatccccaacaatgtgccccatgcagctacctgtaatgttaaattcagaaattatgtaattcccaagggcacggacttaataacatcattgacttctgtgctacatgatgacaaagaatttcccaaccccaaaatatttgaccctgcccattttctggatgagaatggaaactttaagaagagtgactactttatgcctttctcaataggaaagcggatgtgcatgggagaggccctggctcgcatggagctgtttctgcttctgaccaccattttacagaattttgatctgaaatctttggctgatacgaaggacattgacactaccccagtggccagtacttttggctgtgttccaccttcataccagctgtacttcattcctcgctaaagaacagactggcggttgctatgcaggtgtatgtgatatggtccatgcccttcccactattagggatacctctctcatatctc

SEQ ID NO: 4501 - DNA, 567 bp, Mesocricetus auratus; identical to SEQ ID NO: 859
  misc_feature (173)..(191): n is a, c, g, or t

SEQ ID NO: 4502 - DNA, 404 bp, Mesocricetus auratus; identical to SEQ ID NO: 860

SEQ ID NO: 4503 - DNA, 1400 bp, Mesocricetus auratus
  misc_feature (1254)..(1271): n is a, c, g, or t
acctcagagcagcacagcatacccaacagtcaataagggaaaagtacaaacattcaaaataccatggtgtttctcttctcaacccaccagagacactaaatgtgtaagaatgaaagactacctttgtttaaaatgggagtcactcagaggtcacaatgtacagtttttgtcttgggttttaatttcacaaatcatttcacaaagtagatggtatagccacagacaaattatggtatccattgcttttttaaatggtttttaatttgtatatctttttgtacatgtgtctatcttagatatttggctaattttaattggtttgttaacatatcgagaaaccaaatatcaagacaaaaaaaacaaaggaaccacgaaatctagacaagtcaaagttaatttgagataatgactgataatgtcacttagaaaggctaacttgggtttattgttcagtgggggtagaaagagcttcctaaaggaaatatttcagggaaactgacattgattattctaagcaactgaaccaaattgctgacttggtcatgaaataagcaaaactagactctcagggttgcagagattcccagacacattgagctctactatttatcaactttttcaaataaaattttacatggaaggaagattttgtgcaacagaaaagttgtaaagaaagtttatccaaagcataattttaaagacaaaacaatttatgaaacagtcagcccttataatggattttcaaataaaaaatacccagggctgttaaagcactgaataaatatccttttagtagtttatatacaaaacatcactttagctttaattagcagttctcttctttctcctccttttcacttggcttctacttggtgccttttcttttgcactggtggtctgagctctgaaaataaagtaatgaatgccacaactcagtgtatgtgcactgaatcctggaccggattgctagaactctgaaggcatcctgttttatagacatagacagatttttatgtatatttgaaagtaaccagaaatctgttaccttattttctttggagtcttgtctggttccaaaatgatcatttcttcttcttcgctatctgacagcactataggggcacctttaagaaaatacccaaaacttatcaatatcattagtcctagtgctcaagccttcccttcttgcctggaggcagcatatacaacatactctttccaaaaattttgtaaaaaagtcatgttttctgtagnnnnnnnnnnnnnnnnnnaaaagagaactcatgtaggccaagacggtctagtttattactaccagggctaaccatgaaaaatgtagaaaacttttgtttgcccatattaattatatatatgtaaataaagcatgcaaattaatcatt

SEQ ID NO: 4504 - DNA, 797 bp, Mesocricetus auratus
aaccggagaggagtgagcagagacagcgagcatcagatcgtgccccgacccacaccggcatgggctccttctccatcaccgtgggcttcttcctcctcctggccttttggcttccgggccatattggagcgaaccctgtgtacagtgcagtgtccaacacagatctgatggatttcaagaacctgctggaccatctggaggagaagatgccgttagaagatgaggtcgtgcccccacaggccctgagtgagcagaatgatgaagcgccaggggcagcgctcagctctctccctgaggtggctccctggactggagaggtcaacccacctcagagagatggcggtaccctggggcgcagcccctgggacccctccgatagatctgctctcttgaaaagcaaactgagggctctgctagctgcccctcggagcctacggaggtccagctgcttcgggggtaggatcgacaggattggagcccagagcggactaggatgtaatagcttccggtaccgaagataacagccagggaggaaaggcagccagattcgctgggggcagattgcagaagaccccaagccccgtggtgtgtcacgcagcttggtctcattgtcactgaggtgtggcgaacaccctgctggagctgctgcttcctgtcttcatctatcacgacccatgctacatgtagatgagtggttttggggggctctccctctccagccctgcatattaaagtagatcctcacccctttcagaaagcagttggaaaaatttttttgaataaacttcagcaccaag

SEQ ID NO: 4505 - DNA, 600 bp, Mesocricetus auratus
agaaagggaagtgggagagagaaaagaggctcagatacaaagagaggacagaagagtagagggatacaggaaaagtcctgtctgccccaggggaacagtaggaaagagagaggggaaagggagacaggaaagagagcataagtggatggaagtctttcttttaaagggttcctttgcacctgggctgaccagggtactgactgcattctgccaggtgacaagggcaggccagcataatgcctgaatccttacagatcctggttatctgcctatctcaagaccctgaatttaaatatatattcaaagttctctgatgggggatgtctttctgtatatatgtttctcttattggttgaataataaaacactgattggccagtagccaggcagaaagtataggaggcactaccagatcaggataattctgggaggaggaaggcaaagagaagccaccagagaagatgccatgtagtggttgggaatataggacactgaagcattctccacgtggaaatacatagattaatacttatgggtaaataattaagacagagctagccagtaagaagcctgagctattggccaaacagtttaataatt

SEQ ID NO: 4506 - DNA, 429 bp, Mesocricetus auratus
gtgagggagacctacgacttcgacatcgccgtgctcaggctgaagacccccatcatattccgcatgaacgtggcccctgcctgcctgcctgagaaggactgggccgaggccacactgatgacgcaaaagtcaggcatcgtgagcgggtttggacgcacgcatgagaagggccgccagtcacacatcttgaagaagctggaggtgccctatgtcgaccgcaacacctgcaaactctccaccagcttcaccatcacgcaaaatatgttctgcgctggctatgacgccaagccggaggacgcctgccagggggacagtggcggcccccacgtcacccggttcaaggacacctactttgtgactggcattgtcagctggggagaggggtgtgcgaggaagggcaagtatgggatctatacgaaagtcacggcc

SEQ ID NO: 4507 - DNA, 469 bp, Mesocricetus auratus; identical to SEQ ID NO: 865

SEQ ID NO: 4508 - DNA, 600 bp, Mesocricetus auratus
  misc_feature (520)..(547): n is a, c, g, or t
gctaacacaggaaggtgaagatggagatggtgatcttgcagatgaagaggaaggaactgtacaacagcctcaagccagtgtcctgtatgaggatttgcttatgtctgaaggagaagatgatgaggaagatgctgggagtgatgaagaaggagataaccctttttctgctattcagctaagtgaaagtggaagtgactctgatgtgggatctggcagtataagacccaaacagccccgtgtgcttcaagagaatacgaggatgggcatggaaaatgaagaaagcatgatgtcctatgagggagatggtggggaggtttcccgtggtttggaggatagcaacatcagttatgggagctatgaggaacctgatcccaagtcgaacacccaggatacaagcttcagcagcatcggtgggtatgaggtatcagaggaggaagaagatgaggaagagcagcgttctgggcccagcgtactaagccaggtccacctgtctgaggacgaggaggacagtgaggatttnnnnnnnnnnnnnnnnnnnnnnnnnnnngactctgatgaatgaggcttcctttaagcctcttcagtaagccgacagcaacg

SEQ ID NO: 4509 - DNA, 1393 bp, Mesocricetus auratus
gctactgaggatatagttattgtctctatccagtatcgcttgggtatccttggcttcttcagcactggagacgagcatgccagaggaaattggggttacctggaccaagtggctgccctacactgggttcagcagaatattgcctcctttggaggcaatcctggccaggtcactatttttggagtgtcagcaggtggcacaagtgtgtcctcacttgtcgtgtcccccatgtccaaaggactcttccatggagccattatgcagagtggagtggctctgctgcctgaccttatctctgacacacctgaggcggtctatacaccagtggtggccaaccaatctggatgtgaggccaaggattcagaggccctggtacactgccttcgagagaagactgaagcagaaattctggctatcaaccaggtcttcattatgacccctggtgtggtagatgggattttcctacctcggcaccctcaggagctgttggcctctgtggatttccaccctgtccccagcatcattggtgtagacagtgacgagtgtggctggggagtccccttgttcatgggccttgatcatgtcataaagaacataaccagagagaccctgccagcttttctgaagagcagagcagaacacatgatgctgcctcctgaatgtagtgacctgctaatgcaagaatacatgggggatgttgaggacccccagaccctccaagcacaattcagagagttgatgaaggacttcatgtttgtgatccctgcactaaaagtagcatattttcagcgttctcatgctcctgtctacttctatgagttccagcaccagtccagcttcatcaagaataaggatgccaggccatcccatgttagggctgaccatggtgatcatgttgcctttgtgtttggctctgacttctggggcttaaaaattgacctcactgaggaggagaagctgctgaacaagaggatgatgaagtactgggccaactttgcaagacatgggaaccccaacagtgagggtctaccctactggcctgagttggtccacgatgaccagtacttgaagctggatattcagcctgctgtgggccgggccctgaagtctagaaagctgcatttttggacgaagattcttccacagaagatccaggagctaaagggggctcagggcaagcattcagagctttagtgacctctgacagtacagatgcacagggtgagggcagatggagtaatcctgagattacaaaatccagttaattatttttatgtactccaacactcacattagcctttctaaccctcagtacttgcccttttagaaatgtatgacaatccttctatgtggtactaatccttctggatccattttattagatttaataaac

SEQ ID NO: 4510 - DNA, 600 bp, Mesocricetus auratus
cagctgcaaaatattgtatccacggtgaatcttggatgtaaacttgacctaaagaccattgcacttcgtgcccgaaatgctgaatataatcccaagcggtttgctgctgtcatcatgagaataagagagcctcggacaactgcgctgattttcagttctgggaaaatggtgtgcacaggagccaagagtgaagaacaatccaggttagcagcaagaaaatacgctagagttgtgcaaaagttgggctttccagcaaagttcttagacttcaagatccagaacatggtggggagctgtgatgtgaagttccccataaggctggaaggccttgtgctgacccaccagcagttcagcagctatgagccagagttatttcctggcttaatctacagaatgatcaaacccaggattgttctccttatttttgtttctggaaaagttgtattaacaggtgctaaagttagagcagagatttatgaagcatttgaaaacatctaccccatcttaaagggattcaggaagaccacatagtggctgccatgtcctgcctcccctacacacttgttttttaaagccagtcagttttggtaccactgatgg

SEQ ID NO: 4511 - DNA, 1234 bp, Mesocricetus auratus; identical to SEQ ID NO: 869
  misc_feature (876)..(891): n is a, c, g, or t

SEQ ID NO: 4512 - DNA, 1400 bp, Cricetulus sp.
  misc_feature (174)..(221): n is a, c, g, or t
  misc_feature (831)..(890): n is a, c, g, or t
  misc_feature (1175)..(1194): n is a, c, g, or t
catctcagcctccgggatgagcgtccctgtccgcacgcggagctcggcccccaggccctgccctcgcgttctgcaccccgggaggtccccatcaccggcagcaccttgccctcggggccgctgcacgggcctggagaggaggtcttggaaagttactgctagaggcggagccannnnnnnnnnnnnnnnnnnnnnnnnnnnnnnnnnnnnnnnnnnnnnnnaggatgccctgcgaacgggaaagatggagaagggcctccgagcctcgcctggggacagcaggggcctgcagatggagagatgggcagggtgtggaaactgggcttccagcccaggtgcactgaaaatttcttctcattttgtgtacgactgttctgcccgcatggacgtatgtgcgcctcgtgcccgaaggaaggccttccctatgcctgaagggcagaagatcccctggggctggaactccgtgtctgcagcccggagtgcagcagaggtgtctgtgtcctcctgctccacaaggacggattatgagggggcaggttgtgaacgggaagcccggtgtgaggaatgcaggcggctggaccaggagggagaccacagagcggtgatggatttgctgagggatgccgggagagggatcaaaggagactgctgtgacaaacacggagatcagagggctcttggtttggggtgggagtgcaccgaacgaagttaggctgtgggagcagggtactgagggttaaataagagcaggcttctgccgaaccctgctgaatccaggcagccagccgcactgctggcagttaggacacacccttccaccccccagagagnnnnnnnnnnnnnnnnnnnnnnnnnnnnnnnnnnnnnnnnnnnnnnnnnnnnnnnnnnnncctcctcagctggtagggggtgctggactttccccagagagccctgccccggagccgacactgcactccgcacctcgggctttggcttccggtgcagctggaggccctggtaaatcaagcctgaggatcagtagcttctttatggggtgggagacgcagctggaaagggaggtgactagggagagtgtgatgagtaggggtcagctgaagccacaaggaagcatgaacatcacactgccactgtgccctaaggggatcttgattggaaactatttaagacacacnnnnnnnnnnnnnnnnnnnnttaacgttgtgtgtatgagcctgctgcccctctagaaaggtcacaccgaaagtgtaaagctgggacacctatgatcagtctgggcacttggtggcgcgcgcgggggggggggggtgacgttgagttgaaggtcatcttgacagaaagcaagttgaatatttaaactttgtgacaccttatctcaaataaacagtaaaagtagcagg

SEQ ID NO: 4513 - DNA, 600 bp, Mesocricetus auratus
accgaggacacagagtttgagggaggctctagaccttcaagttataggccaagtagctcaggctctgggaaccccatgcctagcaaccctgactggggcgagttttcagagttcacaggaagtagcagcccggcaataaagaaagagtaccacactggaaaactgaccacctctaaaggagataaagagctcgtgatcggaaacgagaaagccacctccactagcaccagcacaagcacgacacgtcgttcatgctctaaaaccattaccaagactgtgataggtcccgatggtcaccgagaagtggtcaaggaagtggtcacctccgatgatggctccgattgtggtggcaccggagacttaggcatgacccacggttttggtggcaggtttgatgaatttgcccacaggttccccgaccaagctgccttttttgatagtcacttcgattctctctcgtctaactacaaagaagttggcagtaagacccacactgcaggctctgattcggacatcttcacagacttaacagacccgggctcccatgtgcctgagtacccttccagtagcaaaacctcaactgtcagaaaacaagtcacc

SEQ ID NO: 4514 - DNA, 600 bp, Mesocricetus auratus
attcccctgtgggttagcacttgacatgtagaggcttgcccttgaatgtggagtccaccttcatcagcatcactctcagagactgaccttgaacaatacagcaggggaaggaaacaagtggaacctggccaccttgaaagcagcccaggaagggggtgggtatgccatgtatcccacagaggctgggggtaggtacatgacacaaactcagtaattaatttcatagcattgcccccaagcactggattttttttctctccaggacccaagttttaggcggtgagtaatgcttgcaagcaagttactgaagaacttagaaatggacagccaatgtgttcagccactcaggcccataccccctgaggcctctagtgtattgtatcatatttctctgtggaaaatgtcatgtttagtcaagttggagccctctcgcctggcccctttgttttccctatcctttctcccaagcacccattgatttctcttctgagaacagtactaccccattcatctattgtagagtaatccctgtgactcaatattaccatagtgcgatgttgttttgtgctattttgaacaattaaaagacttttttgaaat

SEQ ID NO: 4515 - DNA, 600 bp, Mesocricetus auratus
ttagcactctgtccagctgggtgctgctgatggattacctgggcaacgccactgccatcttcatcctacctgatgatggcaagatgcagcatctggagcaaactctcaacaaggaaatcattggcaagttcctgaaggacagacacacaaggtcagccaatgtacacttccccaaactgtccatctctggaacctataacttgaagacagccctggatccgctgggcatcacccaggtcttcagcaatggggccgacctttctgggatcacagaggatgttcccctgaagcttggcaaggctgtgcataaggctgtgctgaccatcgatgagagagggacggaagctgcaggggccacatttatggaaatcatccccatgtctgtgccccctgaggtgaactttaacagccctttcattgccataatatatgatagacagacagcaaagagccccctctttgtgggaaaagtggtggatcccacacgttaatcacaattctcagtcagatgtcatcttttctggattgggtcccctccccagtgacattaaacacaggctgtcctggcccacccatgcctgagtgcttctgcaaatgctc

SEQ ID NO: 4516 - DNA, 1400 bp, Mesocricetus auratus
  misc_feature (219)..(249): n is a, c, g, or t
tgaaggctctaacctgccggtgatggtgtggatccatggtggtgctctggttgtaggaatggcttctatgtatgatggttccatgctggcagccattgaggatgtggtggttgtcactatccagtaccgtctgggtgtcctcggctttttcagcactggagatgagcacgccagaggcaactggggctacctggaccaagtggctgccctacgctgggnnnnnnnnnnnnnnnnnnnnnnnnnnnnnnnccccggccaggtcactatttttggagagtcagcaggtggcacaagtgtgtcttcacatgttgtgtcccccatgtccaaaggactcttccatggtgccatcatggagagtggagtatcagtgatgcctggtatcatctccagctcctctgagatggtttacacaatagtggccaatctatctgattgtgcagctgtgaacacagagactctggtgagctgcctacgaggcaagagtgaagcagagattctggctattaacaaggtcttcaagatcattcctgctgtggtggacggggagtttctaccaaagcatcctcaggagctgttggcctctgctgattttgaccctgttcccagcatcattggtgtcaacaatgatgagtatggatggcttgtgcctgtgatcatgggctctgctcaggaaataaaagaaataaccagagtgaccctgcctgcaattctgaagagcacagcaaatcagatgaagttgcctcctgagtgtggtgacttgctaatggaagagtatatgggggacaatgaggacccacagaccctccaagcacagttcagagagatgatgggggacttcacgtttgtgatcccttcactccaagtagcacattttcagcgtgcccatgctcctgtctacttctatgagttccaacatcggcccagcttctttaaagataccaaaccaccacatgtgaaggctgaccatggtgatgaatttttcttcgtctttggcaacctattatgtggcataaaatttgcttccactgaggaagaggaactcctgagcagaaagatgatgaagtactgggccaactttgcacggcatgggaaccccaacagtgagaatctaccctactggcccatgttggaccacgatgaacaatacctgcagctggacattaagcctgctgtgggacgagccctaaaggccagaaggctgcagttctggaccaaaattctgccccagaagatccaggagctaaagggcactcaagagaggcaccaagagttgtagtaccctgtttgaagaaaggcatgtggccttcatgaagggtgggttctgtctgaagtttggaaagacttttgatcctaacatgcatataagaattaataaaggatatggccatgcatttttaaaa

SEQ ID NO: 4517 - DNA, 1400 bp, Mesocricetus auratus
ggccctctctgcccacgaaaatgtggtagtggtgaccattcagtaccgccttggcatttggggattcttcagcacaggggatgaacacagtcgggggaattggggtcatttggaccaggtggctgcattacactgggtccaggataatattgccaactttgggggcaacccaggctccgtgaccatctttggagagtcagcaggaggtttcagtgtctctgttcttgtgttgtctcctctggccaagaacctcttccacagggccatttctgagagtggtgtggccctcacttctgctctgtttacaaaagacgccaagcccattgctgagctggttgctactctttctgggtgtaaaactaccacatcagctgttatggttcattgcttgcgccagaagacagaggaagaactcatggagacctcacaaaaaatgaatctttttaaattggacctacttggaaacccaaaagagacctaccccttcctccctaccatgattgatggagtgttcctgtcaaagagtccagaagagatcctggctgagaagagtttcaacactgtcccctacatggtgggcatcaacaagcaagagtttggctggatcattccaatgattatgggctatccactctctgaaggcaaactggaccagaagacggctaactccctcttgtggcagtcctacccaacagttaaaatccccaagaatctgattccaatggccactgagaagtatttaggagggacggatgaccctgccaaaaagaaagacctgctcctggacttgattgcagatgtgatatttggtgtcccatcagtaatggtgtctcgtggccacagagatgccggggctcccacctacatgtatgagtttgagtatcgtccaagctttgtatcgaacatgagacccaaggaagtcacaggagaccatggcgatgaaatcttctcagtatttggatctccctttttaaaagatggtgcctcagaagaggagatcaacctcagcaagacggtgatgaaattctgggccaactttgctcgcaatgggaaccctaatgggggagggctaccacattggccagagtatgaccagaaggaagggtacatgaagattggtgcctcagtgcaggcagcccacagactgaaagacaaagaagtgattttttggactgaactcagggccaaggaggcagcagagaggacaacacacagagaacatgctgagctctgatcccaagttccagctatgtttgagagcctggagccaagtaagaggtatgccacagatggtcctgcagagacataaggcttattatctttagggccacacaattgtttggtgttttgtacaaatgcattaaagaggatccttgttgcttcaacttgtaaaaataaaa

SEQ ID NO: 4518 - DNA, 600 bp, Cricetulus sp.
  misc_feature (344)..(375): n is a, c, g, or t
ttttagctttagtttgttggttcctgattgtagaggctatcaagtttgtgtcatcagtctatgttaattaccattaggtaataatgatgaagctgtaagggtagttattttcagtgtaaatgggcttaacatttgaaagattagttatatgtgcctgggtatttgattttatgtagttatgtgcactctgtcccttgtgtccagtacagaaaaggatattcagtctggagttaagatgtagatgagctgccgtatccctgcaggcaactgtacttagtcttctacatgacaacaaataatttgtatttttccaaaacaggcttctctatgtaagagccctagcnnnnnnnnnnnnnnnnnnnnnnnnnnnnnnnnctagcctcaagttcacctgcctctgcctccaaagtgcttgtattaaaggcatgtgctgctactacctgccaagaggaacaaattcttaggaaccatctttccagtcctggtaggtgatattacaaatataggctttgttttttctttttttttaatcatgtgaaattgtacatttctgtttgcatatgtattatcctgggcagggatacatagctgtgttagatc

SEQ ID NO: 4519 - DNA, 1400 bp, Cricetulus griseus
  misc_feature (48)..(64): n is a, c, g, or t
  misc_feature (141)..(177): n is a, c, g, or t
atcggggagatcctaggggctgacttggatgtcgtcatgtctctaaannnnnnnnnnnnnnnnnccaacaagaagcacccgttcccctgccccaccacctaccgcacggccctcacctactacctggacatcaccaacccnnnnnnnnnnnnnnnnnnnnnnnnnnnnnnnnnnnnngcctcagagccctctgagcaggagcagctgcacaagatggcgtcatcctcaggcgagggcaaggagctgtacctgagctgggtggtggaggcccggaggcacatcttagccattctccaagactacccctcactgcggccacccatcgaccacctgtgtgagctgctacctcggctgcaggcccgctactactccatcgcctcctcctctaaggtccaccccaactcggtgcacatctgcgctgtggctgtggagtatgaggccaagtctggacgagtgaacaagggcgtggccaccagctggcttcgggccaaggagccagcaggagagaacggccgccgggccctggtgcccatgttcgtgcgcaaatctcagttccgcctccctttcaagtccgtcacacctgtcatcatggtgggtcctggcacagggatcgcccccttcatgggcttcatccaggagcgagcctggcttcgggagcaaggcaaggaggttggagagacactgctatactatggctgccggcgctcggatgaggactacctataccgcgaagagctggcccgctttcacaaggacggggccctcacccagcttaatgtggccttttccagggagcaggcccacaaggtctatgtccagcacctgctgaagagagacagagagcacctgtggaagctcatccacgagggcggggcccacatctacgtctgcggggatgctcgaaacatggccaaagacgtgcagaacaccttctacgacatcgtggccgagtttgggcccatggagcacgcccaggctgtggactatgttaagaagctgatgaccaagggtcgctactccctggacgtgtggagctaggagctgccacccgcccaccttgctccccgtaatcacttccctaactcccttctgccgacctccacctctggtggtcccttgcgtggcctcgacacagggaggccaagggaccgactcctggcctgactgacacccttctgggccgctcggctgagcccaacccactgtaccaggcaggcggcccagtcccagggcacatggcgagaggagccagccacctctggtgatgggtgccttaggccctcggcagctgtacagaggggcttttctctccagagctgaggtgcagccccaccagtgatttttgaatgagtgtaaataattttaaataaccgggcccttggaataaagttgttttctgt

SEQ ID NO: 4520 - DNA, 600 bp, Mesocricetus auratus
tgccccagcctgtcccagcctgcccctgagaggatctcaaagacacaccattctctggtgctctattgttccctgtaatgcacctcaataaagatgtgaccaccagctgccagagactcgctccttgctctaaactgactcagtccctcacccacagccaggtcctctctgagctgagtggagaattgtttagggctactctctggtcaagctaacaatcttgactactgatttcctggcacagggtgcaccactgcggattgctgagcgtgatctaacatacatgggtgtgtactgtaagttttcacatccagagtaattcgcactgccgttttcctgcactgtcctttcttctcctctgtccttgtcctcatctcttctctccacaaaccccatgccctagccagaacatcttttccacatcacagcaaattcccatgtgtagtcagagatggccatggatagcttgtgtccccaacacttgtcccatcgtcaccaccctctcaaaatcgcacctgcgactagaggagagcctgccctcggaagtccctggaaggtgtctgtggctgcagcagccacaacctttcatccctttctaga

SEQ ID NO: 4521 - DNA, 517 bp, Mesocricetus auratus; identical to SEQ ID NO: 879

SEQ ID NO: 4522 - DNA, 293 bp, Mesocricetus auratus; identical to SEQ ID NO: 880

SEQ ID NO: 4523 - DNA, 387 bp, Mesocricetus auratus; identical to SEQ ID NO: 881

SEQ ID NO: 4524 - DNA, 1365 bp, Mesocricetus auratus
atcacaagcacggcatttggtgtgagcgtcgattctctcaacaacccaaaggaccttttgtggaaaggcaggaagctgttaagatttgatttttttgatccattgttcttgtccgtagtactctttccgttcctcatcccaatatatgagaagttaaatgtctccatgttcccaaaggattccataagttttttcagaaaatttgtggacaaaacgaaggaaaatcgcctggattataaccaaaagcaccgagtggatttccttcagctgatgatgaactctcatgacaattccaaagactcccacaaagctctctctgacatggagatcatagcccagtcaattatctttatttttgctggctacgacaccaccagcagcacactttccttcgccctgtatttactggccactcaccctgatgtacagaagaaactgcaggaggagatcgatattgctctgcccaataaggcacgtcccagctatgataaggtgatggagatggagtacctggacatggtgctgaatgaaaccctcagattgtacccaattggtagtagacttgagagagtctgtaaacaagatgtggaaatggatggtgtgtttgttcccaaaggctccatagtgatggtaccagtttttgctcttcactatgacccacagtactggccagagcctgagaaattccgccctgaaaggttcagcaaggagaacaagggcagcattgatccttatatattcctgccctttgggaatggacccaggaactgcattggcatgagatttgctcttatgaacatgaaacttgctctcactaaagtcctacagaatttctccttacagccttgtaaagaaacacagatcccaatgaaattaagccgaaaagcaatgcttcaaccagaaaaacccattattttaaaggttgtgccacgggatgcaatcataactggagcgtgactttccctcaaggacttctcttgtgttccttgagaatgtggtgtctaagaaaattggaaccttgaacttacttcatgaataaaatgcaaatgaagatgaggcttaatcaactgactctgatgcatggttatggattcagtatacccattgagctttctcagtgttaacacagagtaccatctaatgtaaaatgaataagtcagtgacagaatgagaaattcatcttctatggtgctcatgggaccatgtccatgcacatctgattggctccatcaacttcttttgagctcttttgagagtagccatgcctctgcaatttgatcaataataattttaaaagcaaatacgaaccatcatgacaactcttattgtaaaaaatattccacaataaatgtacactaagcatgt

SEQ ID NO: 4525 - DNA, 600 bp, Mesocricetus auratus
ctgaaccccagctctggtgggcctgtgttctcctggagggaccaggccacgccgcagaaagacggggtcctggtgaccatcaacaagaaaaggaacctggtggtgtctgtggaagacggagccacctttgagattgtcctgcacaggacgtggaaggggagtgccgcccaccaggactttctgggcttctatgtgctggatagctcccggatgtcggcccggacgcgggggctgctggggcaattcttctgccccctggattttgaagtatctgacatccgcccaggctctgaccctatgaagttagatgccacgatgcgtgtgaagaatcggcagctggcagtcaccaggggcttacaaagagactacagcaaggaccccagacatggaacagaggtgtcttgctggttcatccacaacaatggagctggactgattgatggagttcacactgactacattgtcccggacatcttctgagccctccagctagtccgcacctgagactgcatctgaggagggagaggagggcatcgaattaaccccaccctcctgagcgtcctggccctttgtgatttcattaaagagaggctgtgtcca

SEQ ID NO: 4526 - DNA, 1360 bp, Mesocricetus auratus
  misc_feature (233)..(260): n is a, c, g, or t
catcactgcgacttcgactaacacggaattggtcttggaaaccttgagccagatggatgacctggaggattttctatcaaaagacaagcatgcagaccctaatttcaccaaaaaactatgggcctatctcacgatcaaccagctgctagcagagagaagtctggctcctacagctgccatcaaaaggaaaatcacaaaaacaatcttgcagatgtctctagaccatcatattnnnnnnnnnnnnnnnnnnnnnnnnnnnnagaatgaagctggggatgagcgcatgctggctgactccccaccacaggaccattcttgctgctcaggtgcgttatattatggcaccaaggttgcctcagcttccatcccatcatgggccagtccatcccccacaccagtgatggccatgcttgcagtaggagcgaaccgacttgagtccactccacctccacatgtgattcgagtggaaaatgacccccacttcatcatttacctaccaaaaagccaaaagaatatctgtttcaatattgactcagaacctggaaaaatccttagcctggtgtctgatccagaatcaggaatcctagtcaatggccagcttattggtgccaaaaaggcagagaatggaaaactaagaacctactttggaaaattgggattttatttccaaaaagaagacatgaaaatagaaatcagcacagagaacatcaccctgatcaacggttcttctacaactagcttgttctggtctgatacagctcaccttgggaatcagagggtgcttatctccgtgaagaaaggaaaatctgtgactctcaccctaaataaggagatgttcttttctgttctgctacatcatgtgtggaagaagcatccagtcaatgtggactttctggggatctaccttcctccaacaaacaagttttcacccagtgcacatggactcttagggcagttcatgaataagccaaatatccacatcttcaatgagagaccaggaaaagatccagaaaaaccagaggcaagcatggaagtgaaaggacataagctgactgttaccagaggcttacagaaggactacaggacagacatagcgtttggaacagacgttccctgctggtttgtgcacaacagtgggaaaggattcatcgacgggcattacaaggattacctcgtacctcagctctatagctttctcaaacggccttagcggtttatggttttggaaattatatgtgtacattttcttcccttgataggttttgcagttattcctgagctctaacaattcaaaacaaatccagatattgcagtggtctaaaaggcctgctaatccacctgaagaaaataaatatttgca

SEQ ID NO: 4527 - DNA, 1400 bp, Mesocricetus auratus
tgcagggcttctacgaggaggtagctaaccctctgctgacgaacgtggaggtggagtatcccgagaacgccatcctggacctcaccaagaacagttacccccacttctacgacggctctgagactgctgtagcagggcgcttggcggacagtgacatgaacaactttaaggcagacgtgaagggccacggggccttgaatgacctgaccttcacggaggaggtagacatgaaggaaatggacgcagcgctgaaggagcagggctacatttttgggaactacattgaacggctctgggcctacctcactatcgagcagttactggagaaacgcaagaacgcccatggggaggagaaagagaacctcacagcccaggccctggagctgtccctcaagtaccattttgtgactcccctgacccccatggtggtgaccaagcctgaggacaatgaggaccagacgtccattgctgacaagcctggggaagacgccccctacgcagccacgtccacggcctacttgaccagccaccagtctcctccaaccccctactattatgtggacggggaccctcacttcatcatccaagtgccaggaaaaaacgacaccatctgcttcaacatcgacgagaaacccggcaccgtgcttcggcttatccaggacccagtcacaggcatcactgtgactggacagatcattggagataagggaagtagcccttactccaggacagggaaaacctattttggcaaactgggcatcacccacgcttggatggacttccggattgaggtgaccacagagaagatcatcctggggactgaagacgaactgagcacgttcagttggctagacacggtcacaatcacacagactgggctgtttgtagcgatcaacagaaagaagaacatggtcgtgtcctttggagatggggttaacttcgtgatcgttctacaccaggtttggaagaaacatccgcttcaccaggacttcctagggttctacgtggtggacagtcaccggatgtcagcacggacacacgggctgctggggcaattcttccgcccctttgactttgaagtgtctgacgtccgcccaggctctgaccccgcaaagccagatgccacaatggtggtgaagaaccatcagctgactgtcacaaggggctcccagagagattacaggaaggatgccagtgtcggcacaaaggtcacctgctggtttgtccacaacaatggggaagggctgattgacggtgtgcacaccgactacatcgtccccagcttgttctgagtgacgggtcaccccgctgcggaagtggaaggcctggatggtccggagcaaggccgcgggaacgggcttgtgggaagggccaggacaataaagccagcttgtaaacca

SEQ ID NO: 4528 - DNA, 390 bp, Cricetinae gen. sp.; identical to SEQ ID NO: 886

SEQ ID NO: 4529 - DNA, 600 bp, Cricetinae gen. sp.
acaaagaagttttaataagggacacccagttctgagcttagaggcagaaaggtagcatttgttcatacccacacatacacatgatacacatgtgcacacatgcattcacacatttccatgtcctatctttagccccaattcatgcctgtttctggtccaggacaatgccagctttagaaggagttgcctctaaactcccactcactagggaaaaaaaatagtggccgcacccacacttcccggcagccccagatatgctgcctactcacctttagaaggcttctcagcgcccaaacaattctccaaaccaaagcttcctgtctcattcttcagctttccattagcaaaatgagttaccaccagtctctgcggaggccttagcttttcatcctcactattcatggggctgaaatccaagaagtgccatcccaaggaactctgacaagttgaagccaagttctaagagaaatactttgcaggtgagtgtctctcctccctgcctggctgctggccaggacagagcagtgagatgatgggaggggccgctggagcgcccactcccacagaacatttattatcttccagacagagttcatctta

SEQ ID NO: 4530 - DNA, 1118 bp, Mesocricetus auratus; identical to SEQ ID NO: 888
  misc_feature (328)..(342): n is a, c, g, or t
  misc_feature (486)..(521): n is a, c, g, or t

SEQ ID NO: 4531 - DNA, 304 bp, Cricetulus sp.; identical to SEQ ID NO: 889

SEQ ID NO: 4532 - DNA, 294 bp, Mesocricetus auratus
  misc_feature (100)..(134): n is a, c, g, or t
tattacataattagaaatctatagaaaacaaagagaatcttcaggaaatgctgcaattttacattgtgttttcattctccatgactttttaacaattcannnnnnnnnnnnnnnnnnnnnnnnnnnnnnnnnnnaatgtcatttcaatggaacaatgatgttgtaagtgtaccttcaacattctaataaaacatttagcacgggattactctttgctgtttcttctgagcatgagtgagtgaaatctgggcatgtggccacatgcaaggtgattatagacaaagtcttaaagtt

SEQ ID NO: 4533 - DNA, 282 bp, Mesocricetus auratus; identical to SEQ ID NO: 891

SEQ ID NO: 4534 - DNA, 525 bp, Mesocricetus auratus
cgcaacgaccgacctggccaatgggcagcccggtttcaagagcaacatgcctctggcacccgggcacttttagggtcccttttctttcccccacacacaccccaggggggaggacaccattgtggggggcgggggcatgggggggagtgtcagccccgggtagacacagggtcgcaagggtacaaggggggaggggggcggggagaggggcagctgcttttctggcaggggcatgggtgccaggtacagcggagagctggctgcgcatgctgagagcctggggacccacccccaacgctggccgggacttaagtctctctcttctctctctctgtatatatataaagagtccctctatacgtatttatctgtgggtacacgtgcgtgtgtctgtgcggtgaacgtgtgggctgcatggatgtgtgttgggggcctgcccacttgcgcgtgctggggcagagcgagtgtgtgccctggcaatgtcaggtttgttgtttgtctcttgacttgtacctctcaagcccc

SEQ ID NO: 4535 - DNA, 562 bp, Mesocricetus auratus
tagtataagaaaattagggggaaaacactcaaagcaaaggaaaagaagactggacgaaagggagaaaggagagagactgaagaaagaagaccataagaccagcattgcagcactcacaatcactaattccctcaaggctgaaactataatgacacgaaagggttgatgatgtctcactgatgctagtctgcagcccctgcaacgtagcctttgttacatgaagtccgctgggaaatagatgttctttctctatgacaatatattttaactgactttctagatgccttaatatttgcatgataagctagttttcttggttagtattcttgttgtttacgcatggagtcactattcctggttatctcaccaacgaaggctaggaggcggcgtcacaggtgctggggacagagccatgagccagccattttgtgagcactctgatttcttaaagttaaaaaaatatatatataatatctcagtagcctttagttatccatacagatttattaaattttggcccttaacccagccttttccagtgtgtaacccagtttgaaatttt

SEQ ID NO: 4536 - DNA, 1400 bp, Mesocricetus auratus
cctacacctggttcaacctgcaggcgcggaagcgcaagtacttcaagaagcacgagaagcggatgtcaaaggatgaggagcgcgcggtgaaggacgagctgctgggcgagaagcctgagatcaagcagaagtgggcatcccggctgctggccaagctgcgcaaagacatccggcctgagttccgagaggacttcgtgctgaccatcaccggcaagaagcccccctgctgcgtgctctccaaccccgaccagaagggcaagatccggcggattgactgcctgcgccaggctgacaaggtgtggcggctggacctggtcatggtgattttgtttaaggggatccccttggaaagtactgacggggagcggctctacaagtcgccccagtgctcgaaccccggcctgtgcgtccagccacatcacattggagtcacaatcaaagaactggacctttatctggcttactttgtccacactccggaatccggacaatcagatagttcaaaccagcaaggagatgcggacatcaaaccactgcccaatggacacttaagtttccaggactgctttgtgacttccggggtctggaatgtgacagagctggtgagagtatcacagactcctgttgcaactgcatcagggcccaacttctcgctggcagacctggaaagccccagttactacaacataaaccaagtgaccctgggacggcggtccatcacctcccctccttccaccagcaccaccaagcgccccaagtccatcgatgacagcgagatggagagcccagttgatgacgtgttctatcctgggacaggccgctccccagcagctggcagcagccagtcgagtggatggcccaatgacgtggatgcaggccctgcttctctaaagaagtcaggaaaactggacttctgcagcgccctctcctctcagggcagctccccacgcatggctttcacccaccacccgctgcctgtgcttgctggagtcagaccagggagcccccgggccacagcatccgccctgcacttcccctccacgtccatcattcagcagtccagcccgtactttacacacccgaccatccgctaccaccaccaccacgggcaggactccctgaaggagtttgtgcagtttgtgtgctctgacggctcgggtcaggccactggacagcattcacaacgacaggcacctcctctgccagccggtttgtcggcatcggaccccgggacggcaactttctgaacatcccacagcagtctcagtcctggttcctctgattaagatcaacaaagaaacaacaaaatataaaaaaaaaaaaggactgttagtaaaaatatatcaaactgtttctttgtaaaattttatgtattgaggatataaataaatatctccttc

SEQ ID NO: 4537 - DNA, 1400 bp, Cricetulus sp.
  misc_feature (865)..(892): n is a, c, g, or t
ttcttcaagcgagcccgcactcgtgccctgtatgaagctaagaggcagaaggctgagatgaagagccagccgtcagagacagaaaggctgaccgacgactactgaggggggccaccccccctgccccggcccacccggtgtgacttctttaagccgacccgctactaccggatcatgcccaagtaccatgcagtgcgtatccgggaggaggagcgctacccgcctccgggaagcaccctacccaccaagaagcactgggtcaccagctggcagattcgggaccgatactactgactccctccctgacatccctcccagcgctccctcctttcctatttatcataaattatgactctgacagtccaagggggccacatacttggctggcaccagcaggctcaggcatgtgcccctcttcagtgcaggcatgttttctggggccctagactcttcttcaagaccttgcagtgtggagcacagcacggccctgcacactggacacacacacagggcctgtgaagataccatggaggatgccatgtccaagcctctatctgtgccaaaaccaagccaaagcgcctctactgggagccacgaggaaaaggtccctgatgcggtgacctctctcttccacaccgatcccccatgagccattgtgcctggacggactttattgtccagaataaaactactgacgacaaggagacaatcagctgcaagtcctggcacccactggagagtagggccacaccagaggggatgttgttgtgacctgtatgctcagacccaaaagcaaagaactaaaaagcaagtccccagaatgagctttatgaatggatctccaaaaccttggctataggtggannnnnnnnnnnnnnnnnnnnnnnnnnnnaaagagaaaccatggacagcctggacagactgtgctggggctgacctggagcatggtggcatccttcagagagcagggtatcaatcctggcccagcagacactgggaggatgcagaggacatccttctgacccgtcctggcctcctcatcctgggcaaggcctggaagaccccacaagaccacgtgggggtgtaatacttgaatgtaaggcaggggagagcccaacccctgccccagctggccagacttactctgctcttttgaccacagagatggtattctgagctacctgtggctttctgagaaacctctccatgcctcacctgctccgctaggaactgcatccccattccagcagtggaggctgattcccgggtcctctccccgtccctacccacaggcaggcccactccccagctctgccccttcacggtactatagcagcttcctaccctgtgccttctttgtgtatgggcttctcactaaaataaataaacggttcccagtt

SEQ ID NO: 4538 - DNA, 597 bp, Cricetulus longicaudatus
  misc_feature (299)..(321): n is a, c, g, or t
cgactgagctgggaggggccgggaagctgggagtctggatggaggacgaagttggaggtgatgggaggtgggtgggcagaccgcagctcctgggcagacaagttcaggaaggacagccgttggggccgttggatactgggagctggcgctccgccctcttccctctcatccccccacccgcgcctcccaccaccgtcggcggcccctgcgcgtgcgcgcgcgcagacaccggttgccaaacattgcatcatccccgccccccgtcatccctccctcgccgcactctccttcgcccgccnnnnnnnnnnnnnnnnnnnnnnngcgcatgactcactcacctcctccgcggagcctcgtgacccaaagccacttccgggtccaagacaacgtagctctccagccagagggcggggcggaggcgggggccgagggggctcctgagtggcggatgtaggggtggggcggagtcagtgccagcgtgccgctttctgattggcaggctcctgggtcccgccccccaaaagaggggacgggcccgcataaaatatcttctctcggcgctgcagaggtcagtagcctgagtctcacacttcggtc

SEQ ID NO: 4539 - DNA, 329 bp, Mesocricetus auratus
tcgaggcttggctgcgatgtggttgggtgtggccgcccccgcccctggctttcccagtttccacttggcttgaacgtactactgcttcagattgcaggaggagatgctccagagagaggaagcggagagcaccctgcagtccttcagacaggtttgtagccagcagcagccccacccacccaaaccactagcagttctaaaagttacttcgcccaggatttaaaaggtgcaaaacttcaagtcttcctgtaaagccccctggtggcagaaagtccacagatggaaaaactccactatttggatcaatccttgcaacatgaagtttttcg

SEQ ID NO: 4540 - DNA, 600 bp, Mesocricetus auratus
caaaatagccacataaaatagaatgaaaaataattagtataaatagataagataaagaatagactttagtaccgccacatcatcttttctctctttaaaacaggatgttgacaatgcctctctggcacgcctcgaccttgaacgtaaagtggaatccttgcaagaagagattgcctttttgaagaaactgcatgatgaagtaagtgatgtcattactttagtaagcgaacaaggctaagctgcacccatattgtccacatctgacccctctctgtctgctttttcctcaggagatccaggagctacaggcccagattcaggagcaacatgtccagattgacgtggatgtttctaagcccgacctcactgctgccctgcgcgatgtccgccagcagtatgaaagtgtggctgccaagaacctccaggaggcggaggaatggtacaagtccaaggtatgaatgagcccaagggaatgataggatagcctcactctcaaacacctacctcaattcatcaataccccccagctctcctcagtagcagacttttgttgttacagtgtccttgtcactctcgatgcttcctgtagtatggcagaca

SEQ ID NO: 4541 - DNA, 250 bp, Mesocricetus auratus; identical to SEQ ID NO: 899

SEQ ID NO: 4542 - DNA, 600 bp, Mesocricetus auratus
caggatgagattcagaacatgaaggaagagatggctcgtcaccttcgtgaataccaagacctgctcaatgtcaagatggctcttgacattgagattgccacctacaggaagctactggaaggcgaggagagcaggtaggaaaggcagacttgtgcatgggaattaagtcatcaacagtctcttcaggtgcatctcatttaaccttgagactgtttccacaaggtatctgccctttccatagatgggaaacttaaggttgaaaaagaataactgtctgtggtcagagctaattaacagcagagctggtgttgaacccactaccatgccaaagtcaatactttcctctttgtaattcctctgattcatgcccctgtgaagaaaaatgcttgcagtattcaaaatgtactaatgagaccaactgtgggtagatgtttctgaatcagatctctaataatcacagatttcctagtggatgaaaattcaagtgtgtggacttgtttcttcttgtagaagtgcttcattaaaaaaatgtttctttgcttttttataggatttctctgcctcttcccaacttttcttccctgaacctgagaggtaagc

SEQ ID NO: 4543 - DNA, 402 bp, Mesocricetus auratus; identical to SEQ ID NO: 901

SEQ ID NO: 4544 - DNA, 640 bp, Mesocricetus auratus; identical to SEQ ID NO: 902

SEQ ID NO: 4545 - DNA, 1400 bp, Mesocricetus auratus
  misc_feature (54)..(70): n is a, c, g, or t
tcgctcaacgaggaaatcgcattcctgaagaaagtgcacgaagaggagatccgnnnnnnnnnnnnnnnnnttcaggaacagcaggtccaggtggagatggacatgtccaagccagacctcacagcggccctcagggacatccgggctcagtacgagaccattgcggctaagaacatctctgaagctgaggagtggtacaagtccaaggtttcagacttgacccaggcagccaataagaacaatgatgccctgcgccaggccaagcaggagatgatggagtaccgacaccagatccagtcctacacctgcgagattgatgccctcaagggcaccaatgactccctgatgaggcagatgagagagctggaggatcgctttgccagcgaggccagtggctatcaggataacattgcacgcctggaggaggagatccggcacctgaaggatgagatggcccgccacctgcgggagtaccaagacctgctcaatgtgaagatggccttggatgtggagattgccacctaccgcaagctgctggagggcgaggagagccggatcaaccttcccatccagaccttctctgctctcaacttccgagaaaccagccctgaacaaaggggttctgaagtccacaccaaaaagacggtgatgatcaagaccatcgagacccgggatggagaggtcgtcagcgaggccacacagcaacaacacgaggtgctctaagccagacactgtcctggtccccgtggtcactgcctcctgaagccagcctcttccactctcggatgtcacacccagccactttccttcactcacagaatctgacccttcctcaccgatcacccctttgtggtcttcatgctgcccaggaaacaccccagcacctctgcagaccttaccatgagtcctggctgtcggcagtcgcaagcctggctcttcagatagaacctagttcaagtcatggccctttccctcccacctttgtaacctcaggctctacgctttggctttggagatggtaccagagaaggtgttgggatctgtagggtcaggacagagctttatagacaccctcacattcgacccccagcctgggtcagagacagagtgaagcctctcagctgaggtgggggaggggctgaaaaaatgtccttgcgtcccctctctttcccatcccagcccaggatgggttagaaaagctggggctgtaagagggaacctgaaggtgctggatgtgggagcaggagattcagaaggagagcgggtgggtgagaagctggagggaaagaagagagaggcagagagtgggcccaggctggtgggagggccccacctctcacgcctgcccctcccactgcaggggccctggacagaaacaataaagagccaagcacaaacct

SEQ ID NO: 4546 - DNA, 280 bp, Mesocricetus auratus; identical to SEQ ID NO: 904

SEQ ID NO: 4547 - DNA, 166 bp, Mesocricetus auratus; identical to SEQ ID NO: 905

SEQ ID NO: 4548 - DNA, 437 bp, Cricetulus sp.; identical to SEQ ID NO: 906

SEQ ID NO: 4549 - DNA, 600 bp, Cricetulus sp.
  misc_feature (493)..(507): n is a, c, g, or t
tttctgatctggcctgttaattgttaatctgtttactctcacctaggatgatcagcatggacattgaacaagtggttaccctgagcttagcttttctgttggctgtcaagtacattttctttgaacaagcagagacagagtccacactgtctttaaaaaatcctatcacgtctcctgtcgtgaccccaaagaaagctccagacaactgttgtagacgggagcctctgcttgtgagaaggagcgagaagctttcatcggttgaggaggagcctggggtgagccaagatagaaaaggtactttgctgttctcttggtttcagttatcctgtctgagggtgcaccctgaagctgagttcgtttcaaggtgatgttgtctttttgcctctcacacagttgaggttataaaaccattagtggtggaaactgagagtgcaagcagagctacatttgtgcttggcgcctctgggaccagccctccagtggcagcgaggannnnnnnnnnnnnnnttgaactccccagtgagcctcggcctaatgaagaatgtctgcagatactggagagtgccgaggtgagggcgagggtgtgcactcacacttggg

SEQ ID NO: 4550 - DNA, 416 bp, Mesocricetus auratus; identical to SEQ ID NO: 908

SEQ ID NO: 4551 - DNA, 394 bp, Cricetulus sp.; identical to SEQ ID NO: 909

SEQ ID NO: 4552 - DNA, 509 bp, Mesocricetus auratus
  misc_feature (401)..(465): n is a, c, g, or t
aaaaaccaaaaaatgaaatttctcatcttggattaaaataagaaccgtgtgtttacagatttgcacgtctacagaagcttcatgtgaccatggcagggcgcaacctgtacatccgtttccagtccaagacaggggatgccatggggatgaacatgatttccaaggtaagtgtagatctactgtatctgaaaggatggacacacccagaactcattgcttggtgcaggttggccttgaactcatggtgatgcttgtgcctctgctttcttgagtgctgggattacaactgtgcactactgtacccagccatattttttgttgatacactgtctatatattacatgcttaatggattaattgcttttacatgtttattaagccaggtgttggtgcgcacgcgnnnnnnnnnnnnnnnnnnnnnnnnnnnnnnnnnnnnnnnnnnnnnnnnnnnnnnnnnnnnnnnnnccagagtcgagtgccaggataggctccaaagcttcacagagaaa

SEQ ID NO: 4553 - DNA, 270 bp, Cricetulus sp.; identical to SEQ ID NO: 911

SEQ ID NO: 4554 - DNA, 430 bp, Cricetulus sp.; identical to SEQ ID NO: 912
  misc_feature (310)..(324): n is a, c, g, or t

SEQ ID NO: 4555 - DNA, 369 bp, Mesocricetus auratus; identical to SEQ ID NO: 913

SEQ ID NO: 4556 - DNA, 144 bp, Mesocricetus auratus; identical to SEQ ID NO: 914

SEQ ID NO: 4557 - DNA, 183 bp, Mesocricetus auratus; identical to SEQ ID NO: 915

SEQ ID NO: 4558 - DNA, 184 bp, Mesocricetus auratus; identical to SEQ ID NO: 916

SEQ ID NO: 4559 - DNA, 189 bp, Mesocricetus auratus; identical to SEQ ID NO: 917

SEQ ID NO: 4560 - DNA, 125 bp, Mesocricetus auratus
acttacctggtgtggcatcttgtgtgactttaagggagtacagagtggcagccaagccagacccataagagaacactccgatccttttccctgccaactgctgaggcgagtacctgtgtaaggga

SEQ ID NO: 4561 - DNA, 144 bp, Mesocricetus auratus; identical to SEQ ID NO: 919

SEQ ID NO: 4562 - DNA, 182 bp, Mesocricetus auratus; identical to SEQ ID NO: 920

SEQ ID NO: 4563 - DNA, 1380 bp, Mesocricetus auratus
  misc_feature (121)..(140): n is a, c, g, or t
taaaactttatacctctctggacgcctatatgcatgcagtttagtttccaaacatggcatgaaccgagtgcttctgccaacaataagcggaggtactagtgtccaattttaaaaattgggnnnnnnnnnnnnnnnnnnnngtgtaagaattttgtactttaacaaatgaaggagtgcttgtagcttttgaaaaacttttctatgttggggattgtggaatttaaatgtcacacacaaatcctgcttgaaaatggcaaggcaaatatctttttcgaagacttgtaaatcctgaagagagaggtacggttctaggatcaaccatcggtgtgagaaaggttagccgtgaccagagagatgatcagagagatgctggctctgagcaggcctctgccacagcaaatggttcacgtggcgctgtaagcgcagctgggaactggtttcagccagttcaagtggctagtctctgcagcactcagacgctggtgtgagggaacttgttgccatcctggcaccctccttgcaaggctaaaatgtaatgtaggaaggatggggcagtgcattattaggtcacagtgttacaaacccagttcataggctggcagcttaaatccaccagacacctttttctttgtggtatgtgtatttttgtgttttgtttgtttttgtatctgttcaatgaaaataaatatatataacccacattttcacagagtgaaaatttcacatagtctgacaagccaaaaggaatattcatttcaagatctagaagtagaattcataacattttcccccttgactttcacttttaaaacaacaagatctaccacatgagatgagtaagaaaattcactaggagttctctgggtggttttggtgctgaacaatgacatgaccctcacagactgtaaaatagagatagttggaactaatgtacagaactaaatttttttaactttatttgctgttccattctgtgaagtttcagttatctaaactaaacacataaatgtgtaaaagtttcagattgcaaggtaatatgtaatgtagcatttgtaagatattcttgtcaatattaaccagtagaattttgatttgtacagttttaattggttaaaatggtttcattttaacatccactgctatagatgaataatgtaagttcagatttaaagaatggtggggaaatggtgcatgtaattcttttgcaagtattgagagttctgtatgttttgaaaagagtaatgttctggtgccaagaagtggattttctcagagtccattgccagcagtgggcaagcctggcgatcctggcacggagcgttaaccatacaccttactaatagcaaggtggataacttttaaataaagttttagacaaat

SEQ ID NO: 4564 - DNA, 93 bp, Cricetulus griseus
ctttcttcttcccaggaacaccatggacgccctgccagcctgcctgctccgggatgtggcccaggaggccctgggtgcggctgtcattggcat

SEQ ID NO: 4565 - DNA, 120 bp, Cricetulus griseus; identical to SEQ ID NO: 923

SEQ ID NO: 4566 - DNA, 150 bp, Cricetulus griseus; identical to SEQ ID NO: 924

SEQ ID NO: 4567 - DNA, 600 bp, Cricetulus griseus
tgggccagacaacaaagagaactgcccggtgctgggacagcctggagaggcctcagctgtcaggaagctcttcgcccctcagcaagtcctacagcacaactccaccaactgagaggacctggggcctgccagctcctaccccaggttggattctcagagagcagaggacgggctgggactgccgtgcctgatggacaatgtgccctggagaggctcacccgcttctcacagccttttttagttcccttcttggttgctgagatgctttagcccagactagagccagcgcctgcctggtggttagggtttgacatccagccagaggtaggacaaagccacagggtgttgtgacacagaggtgctggcttcttccttcttggtggcttccagtctcaagggccccgcccccgagcaaggcttcacaaccctcactttgtgctgaagcttgacccacaatggcccctagcggtgtctttacaaagtggtgctgttcttgccctactcagagccccaagactcaggactcttggtgagagcctgtgcttcttgtgctatagtgtaaaatgaataattaataatattaaagtttctacttgagag

SEQ ID NO: 4568 - DNA, 429 bp, Cricetulus griseus; identical to SEQ ID NO: 926

SEQ ID NO: 4569 - DNA, 600 bp, Cricetulus griseus
agagacgtgggaagtgggcttttcccaggaggggtccgctactcgggatgcccgagcctgatcggggggccagggcctcggaaatctgtggggaccaagtggacagcctaggtccctcccggagcccccgaaccggtgttgtcggcggctccagcccccgcggtggatcccgagccccgagccgcgggcctctggagcagcacgctggggccaagtggaacccgcagcggcggcgcagggcggggcagagcagcaggatccagagcccagctcaggtccacgtgggtgacccaggagctccgggatccccggggtgagttctctccaggcctgaccctgtgagcaccagggcgggactcctcacgctgggctctgcggggcagtaaggtcagcctagactccggccctgcggccatgcatttggctgacgactgtggtttctccccaggtcgtgatggagtttgaagaggactttagcggaagaaaagacaagaacttcttgaagatgggcagaaagaggtagggggatcgtttcactttcacacttaacgggtcttgtagtttgtagcctccagcgctgcactaaatgacgagtgtttg

SEQ ID NO: 4570 - DNA, 600 bp, Cricetulus griseus
tgagcttttcccaggaggggtctgctgctcgggatgtctgagcctggtcggggggccggggcctcggaagtccgtggggaccaagtggtcactgccccccaggtgctcccggagcccccgagccggtgttgtcggcggcgccagccccgcgcggtggatccgctgccccagctccgagccgccggccggtggagcagcacgctggggccgagcgacccggaggggcggggcggggcggggcagcaggatccagagcccagctcaggtccacgtgggtgacccgggaaacctccgggatccccggggtgagttccctccaggcccggccctgagagcatcagggcgggagtcctcaccgctgggctccgcggggcagtgaggtcagcctagactccgtccctgcggccatgcatttggctgatgactgtggtttctccccaggtcgtgatggagtttgaagaggactttagcgcaagagcagacaagggacttcttgaagatgggcagaaagaggtagggggatcgtttcactttcacacctaacaggtcttgtagtttgtagcctccctccagcgctgcactaaatgagtggttgttatc

SEQ ID NO: 4571 - DNA, 600 bp, Cricetulus griseus
tatatgtaaattatatttatcttttatcttatactacaaatataagtaaatattttaaaaccagtaactttaaaattacctacctttcagaaatgaaaataagaacatttgtgctttaacctttgaaatagaatgtttattcatccactgataagttaaaataattttatctgatttgtttcaagaaactcaaaaatattcaaagtaatcatgcactcaaaggtcttcgtaaggttacagaaaattcaataaaatcttttttgtgtagggactgagtcagggtctagaagatgcttggcaggtactccagtagtgagctggatccagaagattccttaaactttaaaatcttaacactaagtattatcacagagttattacctaagtagaatatttttcctttccttttcaattgacagagtcccacagcaacacagctggctgtaactcttcacatagcttgcgcaggctttgaactcactgtactcctgcctttccttttctaggaaattattttccacatcaagaaaatttaattgttccgatgaggtatagagtaacaaatttctgttatatattcatctgtattaaactgaattc

SEQ ID NO: 4572 - DNA, 600 bp, Mesocricetus auratus
gccgaagccgcaccccccgccgcggccgccaccatcgccgcagcggcagccaccgctgtcgtcgccccaacctctacagtcgctgtggcccctgttgcatctgtcttggagaagaagacaaagagcaaggggccatacatttgcgccctgtgcgccaaggagttcaagaacggctacaatctccggaggcacgaagccatccacacaggagccaaggctggccgggtcccttcgggtgctatgaagatgcccaccatggtgcccctgagcctcttgagcgtgccccagctgagcggggccagcgggggagggggagaagccggggctggcggaggcacaaccgcggttgcagccggtggcgttgtgaccacgaccgcctctggaaaacgcatccggaagaatcacgcctgcgagatgtgcggcaaggccttccgcgacgtctatcacctgaaccgacataagctgtcgcactcggacgagaagccctaccagtgccctgtgtgccagcagcgcttcaagcgcaaggaccgcatgagttaccacgtgcgctcacatgacggcgctgtgcacaagccctacaactgctcccactgtggcaag

SEQ ID NO: 4573 - DNA, 580 bp, Mesocricetus auratus
gagaatgatggagacaggtggggttgatgatgctgggcagtcaagagggatgacaaatgtccagagaagcaggtagaagtaggaaggtggggaggggaaggctggctcggatgacctaagacattctgagtcacacagccagaggcctcgcttaaagggagcactgacttacaaaaggaagcaagcaccagcacagccaggctcctaaggaattcctggccagagacatcttcctacctctgaaggctctgccgtctcttcagaaaggcagccaggtgccagcaggtaagcagaaactgtgttctaagcctcctttgtgtttcggtgctcctggggccattctggagggcacagttcttgctgtatggcttgggtttatagaagcagctaactcagaacattggtcccgtgtggtaggcggaaaagcaatgggcatgagaacagtcaaccttgcatggctgtgcacaagccgtgatgcactgctatctgccttaaggtcccgatgtttgcacctgaaggacttgcgagagctgtgtccggacacacctgtgagcagggacagtgcagactgcgtaccaga

SEQ ID NO: 4574 - DNA, 600 bp, Cricetulus griseus
  misc_feature (498)..(558): n is a, c, g, or t
gaagttccttgggatggtgatggggatatcaagggctgggaccagagaggttcagacccctgctccctaccactggatgagggctcctgtactgcctacaccctgcgctggtaccatcgggctgtgcctggtggcacagcctgccatccctttgtctatggcggctgtggagggaatgccaaccgttttggaacccgtgaggcatgtgagcgccgctgcccaccccaagtagtccacagccaaacaacaggtgctgcctagggccgaagcctgcatgatgcactagatggtcagcagttcctggaggtggcagggctcagcggggtcctgccattctccgtttggtgctagagttctgtgtgcccgtgagcgtgtgtgcgtgtccaccatttcagtgacttggtcctgtgggtctagccttcccccttgtggacaaatccccattgtggtgcctgctttcctggcagatgactcacttgttgggggtggttgtgggannnnnnnnnnnnnnnnnnnnnnnnnnnnnnnnnnnnnnnnnnnnnnnnnnnnnnnnnnnnnctgtttcggggggagagcattaaagctgctgttttaaaaggc

SEQ ID NO: 4575 - DNA, 448 bp, Mesocricetus auratus; identical to SEQ ID NO: 933

SEQ ID NO: 4576 - DNA, 600 bp, Mesocricetus auratus
gccgccgccaactcccggcttcgacggcccgggtgcacacaggtaagccaccagcgttcgctgcccagcacctggccagccaccttcaagcccctatggtgcagatggtcgagccgactccctacctcctgcttctcccggtctgcttgttcctaactgtcccttcattatgcccccgtctagccgctggaaagaactttcagagctggttctccagcttagggatcacaaataattcctcctggacgcctcaagattttctcaccaagcagttctttgggtgcctctgaccttacaaacatccatgtcccatccccaaataccattctaatcagcaccaatcccctcctctgcgttagtttttactaggtctaagtccttttgctttgcttttcagcacatataggaacacacacactcctgccctcaccgccttgccttcttgttacaggctcgctgctgggcacaaaggctccagcatggagctggcatggggactaggtgttcttttcctgttgatgtgtgtggaaatcgaattccagtgagtctccgattccctctctctctctctttctccctctccctccacccctctctcta

SEQ ID NO: 4577 - DNA, 600 bp, Cricetulus griseus
accccactttaaatccaatcaaaaaacgactgagaactctagaactctctgcggttattgctctgtgagcagctgtacctgatactctcactgcctcacctgatgactgggcctctacagctgctgcagccaccttgctcctgaggccttagactggaaatgcattctcttccttttaactgagtttctatctctttattctaccaataagagttaagatgctggttgaaaacctactacctcagagagaaagagcttcctgtacaccaggggaaatatgacaggagcttagaggactccactggaaaaaacactcagtaactattgccacagcacagatcttagatttcaggaaaccaatggacaaatttatgacattcgaaaggtttcctggaacatttatagttacaaaagagactcactaatcaaggcaagtttcagacacgctgcttgaacaaactgttggggttactccaaagagaaatttctaccattctgtgatgacattcttagcatttgtgagatgttcatgttgacattccaaaataattaacttagtattttccattaggcattcattaaagttggataggatctgaa

SEQ ID NO: 4578 - DNA, 600 bp, Cricetulus griseus
tcggcagggagtgacgacgtgtataagcacatcaaagaagcaggcatgtttgctccaacacagaggacagaaggtatctccacatcagacatcatcacccgcattgtccgtgactatgatgtatatgccagacggaacctacagaggggctacactgccaaggagctcaatgtcagctttatcaatgagaagaaataccacttgcaagaacgggttgataaagtaaagaagaaagtgaaagatgtggaagaaaaatcaaaagaatttgtgcagaaggtggaagaaaggagcattgacctcatccagacgtgggaagagaagtcccgagaattcattggaagtttcctggaaatgtttggtccagaaggagcactgaaacatatgctgaaagagggaaaaggtcggatgctgcaggccatcagtcccaggcagagtcccagcagcagccctactcatgaacgctccccctccccctcctttcgatggcccttctctggcaagacgtccccatcttcctccccagcaagtctctctagacacaaggctgtgacctgtgacatcagtgaagacgaagaggactaacttttcatgcccgctccc

SEQ ID NO: 4579 - DNA, 340 bp, Mesocricetus auratus; identical to SEQ ID NO: 937

SEQ ID NO: 4580 - DNA, 413 bp, Mesocricetus auratus; identical to SEQ ID NO: 938

SEQ ID NO: 4581 - DNA, 600 bp, Mesocricetus auratus
tatgcaggcagtgggaccagggatagggctctggacccggccaagagggcccaactgcagaggaggctggacaagaagctgggtgagctcagcagccagaggacaagcaagaggaaggagaaggagagggggacatgaggcgatgtccccatgcagggccgagtggggcagagggccagggcctgtgaccagcttcctcggcagcaggtggaacacagtccagcactagccatttctatgctcattctggcatatccccctatttctcagtgacaagggtggtgttctcaaagagacctgcttggtcttagactccatcagattaactgcctgactgcccagaccccattaatgctgctcaggtgcgtgtcctgagaagtgagtgccgtgcatggctagctggccatggccacctccatcctgtcttcaatgacacagtgggcataaagtgtgtgctctggggataggagggtggctgctccagggctgggaggctcctagcctgtgattgcctgcactctgctgctgcttggtgactggtgagaaggagccatcccagggcacctcactgctcacctcacaaagtctgcatcctctcca

SEQ ID NO: 4582 - DNA, 1400 bp, Cricetulus griseus
  misc_feature (1056)..(1201): n is a, c, g, or t
gcccacaaaccccactgtgattaagtacaatgtgactggtgaaaacggaacctgcctgcttgcctctatggccctgcagatgaacatcacctacatgaagaaggacaacatgactgtgaccagagcattgaacatcagcccaaatgacacagctagtgggagctgcagtcctcatgtggtgaccttgacagtggagagcaagaacagtatcctggatttgaagtttgggatgaatggcagttctagcctgtttttcctacaagaagtccggttgaacatgactcttcccgatgccaacgtgtcgtcactcatggcctccaaccaatcactgagagctcttcaggccacggtcgggaactcctacaagtgcaacaccgaggagcacatctttgtcaccaaggagttttccctcaatgtcttcagcgttcaggtccaggctttcaaggttgaaagtgacaggtttgggtctgtggaagagtgtatgcaggatggtaacaacatgctgatccccattgctgtgggtggtgccctggcagggctcgtcctcatcgtcctcatcgcctacctcatcggcaggaagaggagtcatgccggctaccagaccatctagccggtggacaggcgggtgcgcgtgcgccagacgcacaggggcctgttcttatgtccccgagcttagataggtgtggaagggaggcacactttctggcaaactgttttcaaatctgctttatcaaatgtgaagttcatcttgcaacatttactatgcacaaaggaataactattgaaatgacggtgttaattttgctaactgggttaaatattttgctaactggttaaatgttaatgttaccaaagtagagctctaaggaggacaagaaggctttcagaatcgcacggctcccccatttgacttttttaagacttggtgtttggtttcttcatcctgttactcagatttaagccttacaaagggaatctctggcctgacacttgggcgtggtaagggcggctgatctttaggctgcacgctgaagatgctagaagggaagagcaggnnnnnnnnnnnnnnnnnnnnnnnnnnnnnnnnnnnnnnnnnnnnnnnnnnnnnnnnnnnnnnnnnnnnnnnnnnnnnnnnnnnnnnnnnnnnnnnnnnnnnnnnnnnnnnnnnnnnnnnnnnnnnnnnnnnnnnnnnnnnnnnnnnaaaaaggcattatttttatttactttttgtaaagtgatttccagtcttctgttggtgttgagggtggccccgtttctgcactgtgtacaataaaagattcacactgctgacctgtcctgccgcataggtgggttgtacactgaggaccagctcacgtaatgcattgcctgtaacgatgctaataaaaagtctccttctt

SEQ ID NO: 4583 - DNA, 600 bp, Cricetulus griseus
gagctgaaccaattcagagcagatatcaaggcaatgggtctgagtctacagtggctgtattctgctcgtggagactttttccgtgctacatctagactgacgactgatttccataatgctgagaaaacaaacagatttgtcgtgagggaaatcaataaccgtattatgaaagtggaatatcacttcctgtcaccctacgtatctccaagagagtctcctttccgacacatcttctggggttccggctctcacactctcacggctttagtggagaacttgaagcttcgtcagaaaaacagtagtgcttttaacgaaacactcttcagaaaccagttggccctagctacttggactattcagggagttgcaaatgccctctctggtgacatttgggatattgacaatgagttttaaatgtaacataattaaataagagcagggcagtctgtttctagacttgtactggttgtgctaaattttcattagagctcaaatctaatgttataattctacccgatcatcctgatactaaatgtctttaggcagcagcttttagtgcagggttggacctacacttgaagttacagtggataacacttt

SEQ ID NO: 4584 - DNA, 1400 bp, Cricetulus griseus
  misc_feature (1206)..(1227): n is a, c, g, or t
gacttcctccctttgggcacttctcacacacctgcagtggccagggtgggggtcaggagtgtaaggccatgctggctgcccttggctggtcacgcttggaactcttggtttattctgcatacaatgtgcagccaggagagctagagaagcagaccatctcagtgagctctagctcctctgcaggagggcagcatgcctttattttatggttagaaaggctaaatttctatcaacctagctaaaacattccttttccttgtttcttttttcctcccgttaccatggtgcaaaccagcccgagcgatcgacccgttgtacagccttagcattcccctctcgagcctgcgctggaaggatgttctgcaaacaggagcgtggactatctgaaccatcctcatagtgagtctttatgactgtaagattgtaaatacagattatttattaaccctgttctacctggaattagattgcatatggcaaatgtttgccagcaggtagctgaggcggatcagcaaattgctccagaaccagtgtgtggaatgaccaacagaagtcatcacttttcatttggggcttagagtgatgatttggactcctttggctttcccctttcttttctcgttcgtgtaggaattaggtggcggtcccattgcattcagagagtagagtaaaggaagccagaagtcgatcgtacacactctggcattgacagagaaactataagcctctttattacgagaaagcgatacaaacatgtttctttagttcattattttcccaaaagagtcaaaggtggaacttatatacaaatattacctcatttgttgtgtgactgtgtaaagaattttgcaacaagtagaaagagtttaagtgtcaaaaaacttaaaactactgctgtgtctaaaaagtcagctgttgtacctagcataaaaatcctttgcagaagatgatcccaataaagaatagctttgaaagttaaatacaacttctcaaagttactgctttcgttctatcatctttggtaccgttgcttttatttttataattattttctcattgccattggaatagagatctcagacatgtagatatgctatttaaataatttatcaggaaatactgtcatgtagagtattctatttttatacgtttgcacactgaattgaagaaatgttggttttccttgttttagtttagtttgtttcnnnnnnnnnnnnnnnnnnnnnnctttttactccccagttttactattttgccaatacccttttttttcctaggaatgtgcttttttttgtacacatttttattcattttacattctaaaacagtgtaacttgtatattactgtttcttatgtacaaggaacaataataaatcatatggagatttatatttataaa

SEQ ID NO: 4585 - DNA, 600 bp, Cricetulus longicaudatus
  misc_feature (547)..(561): n is a, c, g, or t
taaaaggaaagtgaaaaggattaattgtattttaaagctacaggttaatgtattttgatgagatgttaaattctcagaaattttattataaatcggactaagttattttatgatatgaaaggttatttatgataaagtttttgaagcacaatatctaaaataaactggtatggaataattgcatcattttcactgtgtggtttgtgttgtgcaacattgactattaacagacatttcattgaagccttgctttacactaggcagaaaaatgggtgattttagagggcttggataagggaaaaaaatgtttacggattccccttgcaaagtttgaataactacaattagttattttaatgctacaaaaatgcatgcaaaatgtagaagcagagaggagggcaaccagggccacttggaagattagtggagcttttgctgaggagaaatcattttcttggggtcttaagaaataaccttaatttctctagttagagagaggaaagggatgttgctaacagcagtttgtgcagaggtgtggaggcctgannnnnnnnnnnnnnncatagagactgactctgcatgcctctggtgtagaaagat

SEQ ID NO: 4586 - DNA, 1400 bp, Cricetulus griseus
gatctttgacaaacctgagaaaaacaagcaatggggaaaggattccctgtttaataaatggtgctgggaaaactggctagccatatgtaaaaagctgaaactggatcccttccttacaccttatacaaaaatcaattcaagatggattaaagacttaaacgttagactgaaaaccataaaaaccatagaagaaaacctaggcattaccattcaggatataggcatgggcaaggacttcatgtctaaaacaccaaaagcaatggcaacaaaagccaaaattgacaaatgggatctaattaaactcaagagcttctgcacagcaaaacaaactaccatcagagtgaacaggcaagccacagaatgggagaaaatttttgcaacctacttatctgacaaagggctactatccggaatctgcaatgaactcaaacaaatttacaagaaaaaaacaaacaaccccatcaaaaagtgggcgaaggacatgaacagacacttctcaaaagaagacatttatgcagccaaaaaacacatgaaaaaatgctcaccatcactggccatcagagaaatgcaaatcaaaaccacaatgagatatcatctcacaccagttagaatggcaatcattaaaaagtcaggaaacaacaggtgctggagaggatgtggagaaataggaacacttttacactgttggtggaactgtaaactagttcaaccattgtggaagtcagtgtggcgattcctcagggatctagaactagaaataccatttgacccagccatcccattactgggtatatacccaaaggactataaatcatgctgctataaagacacatgcacacgtatgtttattgcagcactattcacaatagcaaaggcttggaaccaagccaaatgtccaacaatgataaactggattaagaaaatgtggcgcatatacaccatggaatactatgcggccataaaaaatgatgagttcatgtcctttgtagggacatggatgaaattggaaatcatcattctcagtaaactatcgcaagaacaaaaaaccaaacactgcatattgtcactcataggtgggaattgaacaatgagaacatatggacacaggaagggaaacatcacactctggggactgttgtagggttgggggaggggggagggatagcactgggagatatacctaatgctagatgacgagttagtgggtgcagggcaccagcatgtcacatgtatacatatgtaactaacctgcacattgtgcacatgtaccctaaaacttaaagtataataataaaaaaaaaaaagaataatggccagggtttgatggacaaggtgcctggggaatctgggtttttctgccttaactcttcaccttattcctggtcacattctaggcatag

SEQ ID NO: 4587 - DNA, 600 bp, Cricetulus griseus
  misc_feature (469)..(488): n is a, c, g, or t
gtttttttcttgtaaatttgtttgagttcattgcagattccggatagtagccctttgtcagataagtaggttgcaaaaattttctcccattctgtggcttgcctgttcactctgatggtagtttgttttgctgtgcagaagctcttgagtttaattagatcccatttgtcaattttggcttttgttgccattgcttttggtgttttagacatgaagtccttgcccatgcctatatcctgaatggtaatgcctaggttttcttctatggtttttatggttttcagtctaacgtttaagtctttaatccatcttgaattgatttttgtataaggtgtaaggaagggatccagtttcagctttttacatatggctagccagttttcccagcaccatttattaaacagggaatcctttccccattgcttgtttttctcaggtttgtcaaagatcagtcagtgctcttaacctnnnnnnnnnnnnnnnnnnnntaactccagctttaaggggctccaaaacctctgacctcctcaggtacctacatgcatgtatacatactcccacataggcacttatacacctacacacaattaaaaataataa

SEQ ID NO: 4588 - DNA, 313 bp, Mesocricetus auratus; identical to SEQ ID NO: 946

SEQ ID NO: 4589 - DNA, 1400 bp, Cricetulus longicaudatus
  misc_feature (388)..(438): n is a, c, g, or t
  misc_feature (508)..(533): n is a, c, g, or t
  misc_feature (658)..(716): n is a, c, g, or t
  misc_feature (1245)..(1262): n is a, c, g, or t
gcttaccccacatcacactgggagggttgtccatctgaggaggaagaggatggagaaactgtgaaaaaggctttccgagcctctgctgactctccagggcacaagtccagcacttctgtgtattgcccaggggaggcagaacatcaagccacggaggaaaaacaaacagaaaataaagctgacccccccagctctccttcaggctcccactccagagcctgggagtactgctctaagcaggagggagaagccgacccagagccacacagggcagggaagtatcaactgtgtcagaatgcagaagctgaagaggaggaagaagccaaggtttcatctttgtctgtgtctagtgggaatgccttcctgaaggcctgggtgtatcgacctnnnnnnnnnnnnnnnnnnnnnnnnnnnnnnnnnnnnnnnnnnnnnnnnnnngagggtaaggccttgtcttcccctacctctcctgaacatgacttcctgaaggcctgggtatatcgacctnnnnnnnnnnnnnnnnnnnnnnnnnntagtgactggggatcagctgaggaagagggtaaggccttgtcttcccctacctctcctgaacatgacttcctgaaggcctgggtatatcgacctggagaggacacagaggatgaccaagacagtnnnnnnnnnnnnnnnnnnnnnnnnnnnnnnnnnnnnnnnnnnnnnnnnnnnnnnnnnnntgcctttctcaagacctgggtctgttgccctggagaggacacagaagatgacgactgtgaggttgtggtcccagaagattcagaagcagctgacccagacaagagtcccagccatgaggctcagggttgtctgcctggagagcagacagagggacttgtggaagcagagcactctctcttccaggtggccttctatttacctggagagaagccagcaccaccttggactgcccctaagctgccccttcggctgcaaaggaggcttacgttgttgagaacccccacccaggatcaggaccctgagactcctttacgggccagaaaggtgcatttctctgagaatgtcacagtccatttccttgctgtctgggcaggaccagcccaggctgcccgacgtggtccctgggagcagcttgcacgagataggagccgttttgctcgaagaattgcccaggcggaggagaagctgggtccttacctcacccctgccttccgagccagagcatgggcacgccttggaaacccatcnnnnnnnnnnnnnnnnnngcccatctgtgaccacaccttcttcccttcccagtgaagcccctccttccagcctggactgcggtgggaggcgtggctaaacccaagtcgtttcctgttatttattttaataagaaataaagccttttgatttataca

SEQ ID NO: 4590 - DNA, 461 bp, Cricetulus griseus; identical to SEQ ID NO: 948

SEQ ID NO: 4591 - DNA, 540 bp, Mesocricetus auratus
  misc_feature (31)..(49): n is a, c, g, or t
  misc_feature (89)..(106): n is a, c, g, or t
  misc_feature (128)..(150): n is a, c, g, or t
  misc_feature (205)..(222): n is a, c, g, or t
caaggaaggaccttgctggcttgatgtcttnnnnnnnnnnnnnnnnnnnattttttgtttttcgagacagggtttctctgtgtagcccnnnnnnnnnnnnnnnnnnctctctacttttttgtttttcnnnnnnnnnnnnnnnnnnnnnnncctggctgtcctggaactcactctctagaccaggctgcctcaaactcagaaatcnnnnnnnnnnnnnnnnnnaaatgctgggattaaaggcatgcgccaccactgcccggcattgatgtcattttaatgtgttcccaaatggcccacatcctagaaaattggtctcctgtgtgtggtgctgatgggggtgaagcctttaagaggtgggacctggtatgaggtcaccacactcaaagatttcatgaggttgtcacaggagcacatgaggctgtctcactggctttggcccttccgtgggtgcttctccaccatgtaataatgttgctgggtagggaagggtttaccagggctggctccgtactcgttggactttgagcacagattgagcaa

SEQ ID NO: 4592 - DNA, 542 bp, Cricetulus sp.; identical to SEQ ID NO: 950

SEQ ID NO: 4593 - DNA, 1400 bp, Mesocricetus auratus
catatttttgcactcctgtgtggctgggtgcctcatgagacctgtccagacaagtccacgtaagtcgaagtctaaaagtaaagttggttcaagacaagatggaagtatgaagaaagccagtaaggtatcaacagcagagaagattaatcgctttttagatttcagcctttttaagcatagaggatttttgatctacctatctggaaatgtcattatgtttctagggttttttgcccctattatattcttggctccatatgctaaagacaaaggagtggacgaatataatgcagctttattgctgtctgtgatggcttttgttgatatgtttgctcgaccaactggaggattaatagccaactccaagttaatccgtccacgaatccagtacttcttcagctttgcaatcgtgttcactggtatttgccatctcctctgccccctggcagatacctacccagctttggtggtctactctatattctttggctatggatttggaagtgttagcagtgtcctctttgaaactctcatggaccttgttggacctgccaggttttccagtgctgtgggactcgccacaattgtggagtgttgtcctgttcttcttggccctcctcttgctggcaaattggtcgataaaactaaagactataaatacatgtatatagccagcgggacaattgtggtaatatcaggcatttatctgttcatcggcaatgctataaactatagactcctcgccaaggaaaggaaaagagagaaagcaaggaagaagaaatcagccacccatccttccagagaatcggaggctttgagcagatcaaaacaggatgatgtttctgtcaaagtctcaaatccacacaattctccctcagacagagaaagagaaagcaatatttaacatgagtctcatcttcaatcagtgtttatcaatttacttatgagtttctttgtgtttttcaaagtgttgaaaagaattttagctaaaagaaaggatcacaaacagtaacgaaacttgtattttcctcaatgacactctgcaaatcaatattttgacatttgtttggataggtaaattttgagatcgtgaacacaggaaatccatgcagtggcttatttgcatacctgacttggggtgttgtgatgaaaaagaagaatttttaaatctttcactgacatttacttctagctgtagaatgaaatctgcatcccagacccccctggctttcgtaagcatatgtcaattccatagaatgtctctcttcaaagttctttctttttttaatttgatattgttataaaataaattgaggacagcatttctcttcacacacaaagaatcacatatccacactaacactgagtatctggagaccatgaagaaataaatgaatttg

SEQ ID NO: 4594 - DNA, 600 bp, Mesocricetus auratus
atacagtgaagacaccaactaaaatgcaaatgtatcaaagagaaaacaagtatatacctactggaagaagtaataaaaagagaaaaacagtctttgaatttgatgttaattcagatagttcggaaactactgatctcttgagcatggtttcagaggaagagatatcaaacagactttacaataataattcaccaaattctcatctaacccccaaacagactccattatcactatcaactcctgaatcttttgtgtcacttggaggtgtgagaaaaatgagagaggaccgttgggcaacaattgctaaaactgacaggaaaagaagactaaaggaagcagaaaagttatttgcttaatttcatgaaatcaatgctgatcatagagtctaataacattaaatgtttaactattttattgtttaccagagaccaaactgtactcaggaatttagactttaaaattacttgcataaataatttgtgttcatgttattatatttttggcttaaatatatgttatctgaattttaaaattgtattcagataattacatttgtttttatttgctatggatattaaagttccaagttttttaacttga

SEQ ID NO: 4595 - DNA, 600 bp, Cricetulus griseus
agatgacgacacatcacgcatggaagaagtcgactaagcttcaccagagctatatgtttgatgcttactttcattccttctgataatatattttcaaggatttttgtttgatttttgttaacatttaaaacatctgtgtggcatgttttctaaggggaagaaaaatttctttctacttgtgatactgtgatactctaggcttgactcaacgggttggtagtacatttgtgtaagacaaaatgtaacctattaacttgtggtctgcagtgtttagctgttgagctgattccttagtagaccaaatttgtcacttttggaagtgttctaagatagcttcatgtttaaaaggaaaaagattaagatgggcctaagtttcatcttaaaattttcatcccctgtagttaattctgcatgtactagtcttagaagtaaatacacaagctaaaacaactgaggaattccccatgtggcttgttttcaaagtactgagaacaaaactaagcttccctaggtcttgtaagtgagcaaggcttgtgaatggaaatatagtgcccaatcacattctgctttaaaaggtaaatacagatgagataaaaacct

SEQ ID NO: 4596 - DNA, 1211 bp, Mesocricetus auratus; identical to SEQ ID NO: 954
  misc_feature (888)..(902): n is a, c, g, or t
  misc_feature (1120)..(1158): n is a, c, g, or t

SEQ ID NO: 4597 - DNA, 253 bp, Cricetus cricetus; identical to SEQ ID NO: 955

SEQ ID NO: 4598 - DNA, 1400 bp, Mesocricetus auratus
aaagtcttcagaccagaaaccagggaggaattctgtaagctgcagacaaagaccaaggtgacagtgctggagggtgacattctggatgcccagtgcctgaggagagcctgccagggcatctccgttgtcatccacactgctgccgccattgacgtctttggtgccattcccagacagaccatcatagatatcaacctgaaaggtaccctgaacctgttggaggcctgtgtccaggctagtgtgccagccttcatctacaccagctcaattgatgttgcggggcccaactcctacaaggaaatcgtcctaaatggccatgaggaacaacagcatgaaagcacatggtctgatccatacccatacagcaaaaagatggctgagaaggcagtgctggcagccaatgggtcctccctgaaaaatggtggcactttgcatacttgtgccttaaggcctatgtacatctatggagagaaaagtccattaatttctgtcacaataatcagggccgtcaaaaatagtggtattctggatgttactggaaaattctccacagtcaacccagtgtatgtgaataatgcagcctgggcacacattctggctgccaggggcctacaagaccccaggaagtcaccaaacatccaaggacagttctactacatctcagatgacacccctcaccaaagctatgatgatttaaattacgtcctgagcaaggactggggcctccgccctgattccagttggagacctcctgtggccctgctgtactggcttggcttcctgctggaattggtgagcttcctgctgcgtccggtctacaactaccagcctcccttcaaccgacacttggtcacactctcaaatactgtgttcaccttctcctacaagaaagctcagcgagatctgggctatgagccccttgtcggctgggaggaagccagggagaacacttcagagtggatcgggtcactggtggagcagcacaagggaacactgaacacaaaggctcagtgatgtgactggcgatggcgggaacatgacctgggtgctgtcaggaaatagttgtcaggttctccagaagagacagaggcacaacccaggtcttactgcctccctttgacacagagatcaacttagtgtcttcctcaagacaccagcagctggtccctgacccagccacagggtttcttccctccacacctgcccagtgacacacatgtggctgtgcctcagctgctgtgacctgtgacaacaggcttcagcaattgcaatttcctgtcacatagagttcagtattggttttctttgcactctcaagttctatatcatatcctgcctttgagaaaatcccattgctttatgaagctcaacagaaatagaaataaatattgcaatacctt

SEQ ID NO: 4599 - DNA, 1400 bp, Mesocricetus auratus
  misc_feature (423)..(437): n is a, c, g, or t
ggtcagactcctggacaaggtgttcagaccagaaaccagggaggaattcttcaagctgcagacaaagaccaaggtgacagtgctggagggtgacattctggatgcccagtgcctgaggagagcctgccagggcatctccgttgtcatccacactgctgccgccattgacgtctggggtatcattcccagacagaccatcatagatatcaatgtgaaaggtaccctgaacctgttggaggcctgtgtccaggctagtgtgccagccttcatctacaccagctcaattgatgttgcggggcccaactcctacaaggaaatcgtcctaaatggccatgaggaacaacagcatgaaagcacatggtctgatccatacccatacagcaaaatgatggctgagaaggcagtgctggcagccaatgggtnnnnnnnnnnnnnnngtggcactttgcatacttgtgccttaaggcctatgtacatctatggggaaaaaagctcaatactttcagggataatgattagggccatcaaaaataatggtattctgaaagttactggaaagttctccacagtcaacccagtgtatgtgagtaatgcagcctgggcacacattctggctgccaggggtctgcaagaccccaagaagtcaccaaacatccaagggcagttctactacatctcagatgacacccctcaccaaagctatgatgacttaaataacaccctgagcaagaaatggggcctccgccctgattccagttggagacctcctgtggccctgctgtactggcttggcttcctgctggaattggtgaacttcctgctgcgtccggtctacaactaccagcctcccttcacccgatacttggtcacaatctcaaatactgtgttcaccttctcctacaagaaagctcagcgagatctgggctatgagccccttgtcggctgggaggaagccagggagaacacttcagagtggatcgggtcactggtggagcagcacaagggaacactgaacacaaaggctcagtgatgtgactggcgatggcgggaacatgactgggtgctgtcaggaaatagttgtcaggttctccagaagagacagaggcccaacccaggtcttacttgcctccctttgacacagagatcaacgtagtgtcttcctcaagacaccagcagctggtccctgacccagccacagggtttcttccctccacacctgcccagtgacacacatgtggctgagcctcagcttctagttccaaaatattcagcacctcttgtaccttagagctctctccattggctacatctcccccacaaaaagcatttcttacctttggaaaattcccattactttatgaagtgcaatcaaaggagcaataaatatttgttaatacctc

SEQ ID NO: 4600 - DNA, 1400 bp, Cricetus cricetus
  misc_feature (233)..(247): n is a, c, g, or t
ccctgctgtgtgtctccgccctgactgtcatctcctatgtcacacccgtgttcctcgtggccctcttacccctagctgttgtgtgctacttcattcagaagtacttccgagtggcatccagggacctgcagcagctggacgacacgacgcagctcccgctcgtctcacactttgctgaaactgtggagggactcaccaccatccgtgccttcaggtacgaggcccggttccannnnnnnnnnnnnnnatataccgactccaacaacatcgcctccctcttcctcacggcagccaacagatggctggaagtctgcatggagtacatcggagcgtgcgtggtactcattgcggctgccacctccatctccaactccctgcacagggaactttctgctggcctggtgggcctgggcctcacctatgccttgatggtctccaactacctcaactggatggtgaggaacctggcggacatggagatccagctgggggctgtgaagaggatccacgcactcctgaaaaccgaggcggagagctatgaggggctcctggcgccgtcgttgatccccaagaactggccagaccaagggaagatccaaattcagaacctgagcgtgcgctatgacagctccctgaagccagtgctgaagcatgtcaacaccctcatctccccggggcagaagatcgggatctgcggccgcacaggcagcgggaagtcctccttctccctggcctttttccgaatggtggacatgtttgaaggacgcatcatcattgatggcatcgacatcgccaagctgccacttcacacgctgcgctcacgcctgtccatcatcctacaggaccccgtcctcttcagcggcacgatcagattcaacctggaccccgagaagaaatgctcagacagcacactgtgggaggccctggagatcgcccagctgaagctggtagtgaaggcactgccaggaggcctagatgccatcatcacagaaggaggggagaattttagccagggccagaggcagctgttctgcctggcccgggccttcgtgaggaagaccagcatcttcatcatggatgaagcaaccgcctccatcgacatggctacggagaacatcctccagaaggtggtgatgacagccttcgcagaccgcacggtggtcaccatcgcgcatcgtgtgcacaccatcctgagtgcagacctggtgatggtcctcaagaggggtgctatcctggagtttgacaagccagagacgctcctcagccagaaggacagcgtgttcgcctcctttgtccgtgcggacaagtgacttaccggagccaaagtgccaccccgcgcctcgcttgcttgcctaggatttctaactgcaaatcacttgtaaataaattaattctttgct

SEQ ID NO: 4601 - DNA, 600 bp, Cricetulus griseus
  misc_feature (220)..(244): n is a, c, g, or t
  misc_feature (247)..(259): n is a, c, g, or t
  misc_feature (263)..(284): n is a, c, g, or t
gcagcgcatctcccagagccagaaggagcactataagaagctggcggaggagcagcagaagcagtataaggtgcacttggacctctgggtcaagagcctgtctccccaggaccgtgcagcatacaaagaatacatctccaataaacgtaagaatatgactaagcttcgaggcccaaatcctaagtctagccgaaccaccctgcagtctaagtcggagtcnnnnnnnnnnnnnnnnnnnnnnnnngannnnnnnnnnnnngagnnnnnnnnnnnnnnnnnnnnnnaatggggactcctctgaggatggcggggactcttcagagtctagcagcgaagatgagagcgaagatggggatgagaatgaggacgacgatgacgacgacgatgacgatgaggatgacgatgaggatgaagacaatgagtctgagggcagcagctccagctcttcctcttcaggggactcctcagactctgactccaactgagctcagcccccaccctgggcaggcagccaaggagagccactgcagagctcccctccccacctgaccacctttgtctctccctatgttctgtcccctcagcttcccccactttctt

SEQ ID NO: 4602 - DNA, 600 bp, Cricetulus griseus
  misc_feature (220)..(244): n is a, c, g, or t
  misc_feature (247)..(284): n is a, c, g, or t
gcagcgcatctcccagagccagaaggagcactataagaagctggcggaggagcagcagaagcagtataaggtgcacttggacctctgggtcaagagcctgtctccccaggaccgtgcagcatacaaagaatacatctccaataaacgtaagaatatgactaagcttcgaggcccaaatcctaagtctagccgaaccaccctgcagtctaagtcggagtcnnnnnnnnnnnnnnnnnnnnnnnnngannnnnnnnnnnnnnnnnnnnnnnnnnnnnnnnnnnnnnaatggggactcctctgaggatggcggggactcttcagagtctagcagcgaagatgagagcgaagatggggatgagaatgaggacgacgatgacgacgacgatgacgatgaggatgacgatgaggatgaagacaatgagtctgagggcagcagctccagctcttcctcttcaggggactcctcagactctgactccaactgagctcagcccccaccctgggcaggcagccaaggagagccactgcagagctcccctccccacctgaccacctttgtctctccctatgttctgtcccctcagcttcccccactttctt

SEQ ID NO: 4603 - DNA, 600 bp, Cricetulus griseus
  misc_feature (488)..(503): n is a, c, g, or t
actgagctctccgcgaggaccacatgcgggacacacagggatggaatctctgaactgaagtccctccttccttcttcaggccacctgaacttcctcctctgcacagggtcccctcatccctgggcctcccccaccccgcgcactccgcatccccggtccttctcatggccccacatacctgggcctcgcccagccccagctcgatggcctccagcgagtgcttcaccacctgtcgcttctcctccagcagctccactccaggcacagggcccggtgcagccagggcctccgccaagtgcccagcgagactgcagtgctcagcccgcagggcctccagcccctgcactacctgtctcgtctgccgcaccagctcctcggggttcaggcgctctgggcccagccctgtgcttccgggggctgccacctgcacagacatggctactcctgggggtgggggtgggggtggggggcagtgagggtgagggagnnnnnnnnnnnnnnnnacagactcacagcctctcttcattccagccatccccctgccccacccatcctggctggctcccctttccaccccaggcagccttcatgggggaattc

SEQ ID NO: 4604 - DNA, 578 bp, Mesocricetus auratus
  misc_feature (239)..(265): n is a, c, g, or t
agtcatcttgcatgaaggttctatgtcatgatctccttcccccagaaaaaagacatcggactggtcaggacttcctctggggataagaccctggagaggagctttgtacatgttccgaatttgcacatggggatttgacctctatctccactccaaagttgtgggtgtcctattgcttcaaaaataaatgattagggggagatgtgaggagccgccctcgctatcgctattgccgttannnnnnnnnnnnnnnnnnnnnnnnnnnttggagttaactgtcgctgtcagttggagttaactgtcgctgtcagttggagttaactgtcgctgtcagttggagttaaccgtttaaactgtgcctctcccgtgacgtcatctggggtgatgtgcaaaccaccaatcccggctctacacatctcactcggagctcctaggcttatataaggggctgggtttcttagcttggggtctccctctaagaagctgatcatctatgtctcaagatgcattaaagctttactgcagaaggatccgagtgttctgcgtcgttcttgctggcgagacggtagcgcgggaca

SEQ ID NO: 4605 - DNA, 117 bp, Mesocricetus auratus; identical to SEQ ID NO: 963

SEQ ID NO: 4606 - DNA, 99 bp, Cricetulus griseus; identical to SEQ ID NO: 964

SEQ ID NO: 4607 - DNA, 591 bp, Mesocricetus auratus; identical to SEQ ID NO: 965

SEQ ID NO: 4608 - DNA, 499 bp, Mesocricetus auratus; identical to SEQ ID NO: 966

SEQ ID NO: 4609 - DNA, 588 bp, Mesocricetus auratus; identical to SEQ ID NO: 967
  misc_feature (139)..(198): n is a, c, g, or t
  misc_feature (413)..(437): n is a, c, g, or t

SEQ ID NO: 4610 - DNA, 247 bp, Mesocricetus auratus; identical to SEQ ID NO: 968

SEQ ID NO: 4611 - DNA, 600 bp, Mesocricetus auratus
ctctacgctttggctttggagatggtaccagagaaggtgttgggatctgtagggtcaggacagagctttatagacaccctcacattcgacccccagcctgggtcagagacagagtgaagcctctcagctgaggtgggggaggggctgaaaaaatgtccttgcgtcccctctctttcccatcccagcccaggatgggcttagaaaagctggggctgtaagagggaacctgaaggtgctggatgtgggagcaggagattcagaaggagagcgggtgggtgagaagctggagggaaagaagagagaggcagagagtgggcccaggctggtgggagggccccacctctcacgcctgcccctcccactgcaggggccctggacagaaacaataaagagccaagcacaaacctacatgcccctgctgtcttgactggaccctgtcataccacccatcaccctgagatggacggtgtcaccctcttgccaggtagattgctctaaggcctccaggctgcagtctatgtgctgcataggggaggttggacaaggggcttctgttacaatgccacagtgatgcccctttccttaagctaccttcagatc

SEQ ID NO: 4612 - DNA, 1400 bp, Cricetulus griseus
  misc_feature (439)..(453): n is a, c, g, or t
  misc_feature (577)..(590): n is a, c, g, or t
  misc_feature (592)..(604): n is a, c, g, or t
gcaatgcctgctgggagctctactgcctggaacatggcatccagcctgatggccagatgccaagtgacaagaccatcgggggaggagatgactccttcaacaccttcttcagtgagacaggcgctggcaagcatgtgccccgggctgtgttcgtagacctggaacccacagtcatcgatgaagttcgcactggtacctaccgccagctcttccaccctgagcagctcatcacaggcaaggaagatgctgccaataactatgcccgtggccactacaccatcggcaaggagatcattgatcttgtcttggacagaattcgtaagctggctgaccagtgcacaggtcttcagggcttcttggttttccacagctttggtgggggaactggctctgggttcacctccctgctgatggagcggctctctgtcgattatggaannnnnnnnnnnnnnnagttctccatctacccagccccccaggtttccactgctgtggttgagccctacaactccatcctcaccacccacaccaccctggagcactctgattgtgccttcatggtagacaacgaggccannnnnnnnnnnnnncnnnnnnnnnnnnncattgagcgccccacctacactaaccttaaccgcctcattagccagattgtgtcttccatcactgcttccctcagatttgatggagccctgaatgttgacctgacagaattccagaccaacctggtaccctaccctcgcatccatttccctctggccacatatgcccctgtcatctctgctgagaaagcctaccatgagcagcttacagtagcagagatcaccaatgcttgctttgagccagccaaccagatggtgaaatgtgaccctcgccatggtaaatacatggcttgctgcctgctgtaccgtggggatgtggttcccaaagatgtcaatgctgccattgctaccatcaagaccaagcgtaccatccagtttgtggactggtgtcccactggcttcaaggttggcattaattaccagcctcccactgtggtacctggtggagacctggctaaggtccagagagctgtgtgcatgctgagcaacaccacagccatcgctgaggcctgggctcgcctagatcacaagtttgatctgatgtatgccaagcgtgcctttgtgcactggtacgtgggtgagggcatggaggagggggagttctctgaggcccgtgaggacatggctgccctagagaaggattatgaggaagttggggcagacagtgctgaaggagatgatgagggtgaagaatattagcccatgtgctgcaattttacacttcattgtcttgtgtttgtctttgtatgtatatgactgtcttacactatcaataaaggtgtttccatattaagtggg

SEQ ID NO: 4613 - DNA, 987 bp, Mesocricetus auratus; identical to SEQ ID NO: 971

SEQ ID NO: 4614 - DNA, 364 bp, Cricetulus griseus; identical to SEQ ID NO: 972

SEQ ID NO: 4615 - DNA, 420 bp, Cricetulus griseus; identical to SEQ ID NO: 973

SEQ ID NO: 4616 - DNA, 600 bp, Mesocricetus auratus
ccttaaaccagtctggagcggtgactcatttccccagggagaagtggcgcggccattggtgagcacgacgcaagccccgccccacccagcccggccccgccctgctacccctcctgactcactgccccgcccgctcccccgcggcgtccgagcagcagaccgagaaggcacatcgagtccactcgtcgcgtcggtggcaggtaagcggcttctgaagcctggccccgggaagggtgctggagccaggcctcggtaagccttcggcttcccagagccaagcccggcttactccggctctcggggcgctgaggccgcggggctgaggttgagtctggctgggaggtgaccgcgcacccgcagccgcgcgtctccttgagggaccgaaccccaggagaggccaggagccatcccttcctcccgagcccggctcacccccagagtcgctcggggatgggggatgggggatggggtggcatcttttgactgtcgtttgctgttttcttctctctttgtaatagctacagcgaacataattttacccagggttccaccgtggtctcgtccgtcctcggcatctctcagtccagtacatacccaagg

SEQ ID NO: 4617 - DNA, 703 bp, Mesocricetus auratus; identical to SEQ ID NO: 975

SEQ ID NO: 4618 - DNA, 500 bp, Mesocricetus auratus; identical to SEQ ID NO: 976
  misc_feature (351)..(367): n is a, c, g, or t

SEQ ID NO: 4619 - DNA, 150 bp, Cricetulus longicaudatus; identical to SEQ ID NO: 977

SEQ ID NO: 4620 - DNA, 600 bp, Mesocricetus auratus
gtatggattatgtattgtaagtacagataatctctattctcaactaaaataaaattgattaaaattgcattctatgtcgcaggccccagctctgccccctcagggctgcacggctgagccaagtgggctggtaggggaagtccaggccagcgggcagcgggtgcagccaaggcagtgctttcttccctggagcatgcggcttgtgctggatgctgcaaaaagagaggagtgtgtgaaggtgatgcgactggtaggggcggcacgagggacttgggccatgggctgggtgccttggggtggcagaaccgtggcagagcaggccaggccgtggtgggggtggagagacagggttccggttggttaatggcaccagttggccgggcttggcccctgacttaactttctgggtgcggcatgcgtgccagttgccgggggctgggggatggggggacctgaacgaggatgtcagtttggaggtctggttaatctatggagtcactgaaagtagatcagtatttatcactagaacacgaatggaatttgggagtctattccacctagagggatattctctctgcctagacacacagctagggtcga

SEQ ID NO: 4621 - DNA, 600 bp, Cricetulus sp.
acacgaggcgcgtacgcagtgcacacatacaggtacgcaaaatacccatacacataaaagaaacagacctttaaaaagtaaaaaccaattgtaacaatacaatataggctgcaaatctaaggttttcaggcagggggctcctccgggaatcggcggaggcgtcagggtggcgtcacctggctgtgacagcctgcggcccggatgcacagagcgcgcggaggtcgaggggctggcggagagcgagccaggcgccgcagcgaggggcccaggtgggacatcatgcagcaggacatcgggcttcctaagaggaccaatggctggaacgaggcagcccaacctcagaaaggcgacagagagctgaagagcctagcaccagctctggaaaacacctgagatcggagttagtccgggttgggaagggggtggaaatgaactcaaatatctcacgctcctgaaccggaaatgcttgtgctctcgctagagacgttctaggcacgaaagccggtgactcgatagccggaagtcatccgaacgtaggctaggtctaccaaggcggggttagacagcaggctgttccgtttggcagccaggatggcatcg

SEQ ID NO: 4622 - DNA, 528 bp, Mesocricetus auratus; identical to SEQ ID NO: 980
  misc_feature (143)..(491): n is a, c, g, or t

SEQ ID NO: 4623 - DNA, 600 bp, Cricetulus sp.
  misc_feature (455)..(499): n is a, c, g, or t
accggggagggggacagcgggactgagctaggtgggttccccggcgatccccagcgcctgtccgtgacgggcaggccagcacgtggtggacacctgagggagcgcgtggtggcctgcgtggtacctccacgtggcccgcctccagagtggcgacgtcggaagtggttctgtgaaagacgtgctcctctccagaaggggctacccaaatagatacccctgccccggcagatgatttagagtgaaattcaaagggcaatgaatgactagtagattgtcttcagttgtctctggaagggaaagacaagttatataggtgattctcaggaaagattgccacatataataatgccaatgatgtcacctgtgcttagggcctttaacaatatagacagtgggcattaagaaagaagataatggcgaaacgcaaaatggcttacaaatagggtatcgacatnnnnnnnnnnnnnnnnnnnnnnnnnnnnnnnnnnnnnnnnnnnnnctaagaaaatggctcctcctccaaaagaggtggaagaagatagtgaagacgaagaaatgtccgaagatgaagaagatgacagcagtggagaagaggtatac

SEQ ID NO: 4624 - DNA, 277 bp, Cricetulus sp.; identical to SEQ ID NO: 982

SEQ ID NO: 4625 - DNA, 600 bp, Mesocricetus auratus
tagaaattaagtgttcttaactcaatgaaagaagtgtgtcaggtgatggacatgtgtggattagctagacttaatcagttcacaatgtctgtatggattatgtattgtaagtacagataatctctattctcaactaaaataaaattgattaaaattgcattctatgtcgcaggccccagctctgccccctcagggctgcacggctgagccaagtgggctggtaggggaagtccaggccagcgggcagcgggtgcagccaaggcagtgctttcttccctggagcatgcggcttgtgctggatgctgcaaaaagagaggagtgtgtgaaggtgatgcgtttcactgacagatcaacaggcactgtttgttctctttcttcctcttgaatcaaatccaaaatgctttcattcttatatttttggttgtgccatcaccacccagcttgattctgaatatgacatggttattgcctacatcaactaccaaaacctgcggttgcctgcaaaagatgaagccagataaatttcttgcactaatttgattgggtggaggtgtggctttggcgtgcttgtaagtttgggcggatgaggaagtggggcgc

SEQ ID NO: 4626 - DNA, 1400 bp, Cricetus cricetus
  misc_feature (555)..(576): n is a, c, g, or t
ctcttttggtgacctataatactgtagtttaaaattctttttggtgtgtcacatatcacttgtgggaactaaatctgaagtattcccttctgttgtgtttctttactttctcatcaggatggcaacttaacaagagtgctcctccataacctgtgtcttcgttagtagcagaaatgctttagaggtctctcctgcattccaacaagttaatgggggaaagggaatatgaccactgaagactgtggcgtctccaggcatagagtagcagccatatcaataaaaagggaaatagagcaaataatatccagactctggcatgttcctgcatatgtaaaattttgcatatgttcttatttttaaattttgttactccttttttcatgtatttgtgtatcttgtgtgtggtgggggacacatgtttgcatgcagaggtcagaggacagtttacaggagctgggtctctcctcccaccgagtggtctcagggttgttctcaggtcatctaactggcaataggcatttttcccaccccatgagtgctctcaccaataaccannnnnnnnnnnnnnnnnnnnnncttggcattctgtcatgtcatgggaaaacctccaaggcaaatcattagtgactgagtgttgggaatgacagtgccacttggtcaccagtctcttccatcatgctttctgtttcactctgaccagactcctgagcaaagccaggaatatcgttgtaattttgtttaagggacagagtctttgattggcagcaaaatctttgatcagctccgtttacaaattgtgcctggtttcagtgctgcagtgtgggtttctaagccctggaacatccttgtaagggaaacagaaacagtggggagctgttttgtgtttggttactatgatgttgatgaaggaatgaagccaggcagggtggttagactatggtcggctttggagaattgtttttactggtttcttatctttcacttttcctgtacacatctgttttaatacaggtacagcctgactgtttggactggaaaggatgacagttatcccactgaagatttactttatattcgagactactttaataaaacccaagttttctatgatattttggaaccacaaagccatgaatttaaacaagccattgggatctgagtcactctaagaatacaagaagacattttctaatcattttctctcttggcttcaccatcattctctgctttgtctgaattcattgctgtattaattgtgattattggtttgtactaaattatccaatcaaaatgcttgttgtatacctactcttcctttatcatgtcttcatggctgcacacatctgaaagattttatgaactgcaataaaattgtataaaattatagtaaaaatgctcaa

SEQ ID NO: 4627 - DNA, 303 bp, Cricetulus sp.; identical to SEQ ID NO: 985

SEQ ID NO: 4628 - DNA, 315 bp, Cricetulus sp.; identical to SEQ ID NO: 986

SEQ ID NO: 4629 - DNA, 251 bp, Cricetulus sp.; identical to SEQ ID NO: 987

SEQ ID NO: 4630 - DNA, 92 bp, Cricetulus sp.; identical to SEQ ID NO: 988

SEQ ID NO: 4631 - DNA, 86 bp, Cricetulus sp.; identical to SEQ ID NO: 989

SEQ ID NO: 4632 - DNA, 97 bp, Cricetulus sp.; identical to SEQ ID NO: 990

SEQ ID NO: 4633 - DNA, 89 bp, Cricetulus sp.; identical to SEQ ID NO: 991

SEQ ID NO: 4634 - DNA, 93 bp, Cricetulus sp.; identical to SEQ ID NO: 992

SEQ ID NO: 4635 - DNA, 274 bp, Cricetulus sp.; identical to SEQ ID NO: 993
  misc_feature (129)..(146): n is a, c, g, or t

SEQ ID NO: 4636 - DNA, 356 bp, Cricetulus longicaudatus; identical to SEQ ID NO: 994

SEQ ID NO: 4637 - DNA, 444 bp, Mesocricetus auratus; identical to SEQ ID NO: 995
  misc_feature (133)..(182): n is a, c, g, or t

SEQ ID NO: 4638 - DNA, 600 bp, Mesocricetus auratus
gcctcctccctcctccccactatgggcccctgagcttccacgacatgttccagcctttcctcgagatgatacaccaggcgcaacaggccatggatgtccagttccacagcccagccttccagttcccggacatggatttgttaagagaaggtgaagatgaccgtgcagtgtgcaaggagatccgccacaactccacaggatgcctgaagatgaagggccagtgtgagaaatgccaggagatcttgtctgtggactgttcagccaacaacccagcacaggctcacctgcgccaggagctgaacgactccctccaggtggccgagaggttgacccagcgatacaacgagctgctccattccctccagaccaagatgctcaatacctcatccctgctggagcagctgaacgagcagttcaactgggtgtcccagctggctaacctcacacagggcgaggaccagtactaccttcgcgtctccacagtaacaacccactcttctgactcagaagtcccctcccgtgtcacgtaggtggtggtgaagctgtttgactctgaccccatcacagtggtgttaccagaagaagtctccaaggatcacc

SEQ ID NO: 4639 - DNA, 204 bp, Mesocricetus auratus; identical to SEQ ID NO: 997

SEQ ID NO: 4640 - DNA, 853 bp, Mesocricetus auratus
agcggctttcctctgttgtagtccacagtgcaacacatcttctcagagatgcagctgcctttgactccactgtccttctctgggacactccttttgatggcaatgtcaaattttctcctttgggaacatgtgacctcctcagcaagtcctcgtttatccactagaaacttgtaccagcgtgtggttgaattgtcacactgcacccatgatcttgcctcaaaagttttcactgactttaatatgaagtttggtaagagtatttgcagacagaaactgatgttatacacctgccacacctcctctattcctactccagaaaacagagagcaagtccaccaaacaaactcggaagatctcctgaaagtgacgatcagtgttttacaagcctgggaggagcctgtgaagcacatggtggctgcagtagctgctcttccaggtacatctgatgccatgctgtcaagagcaaaagagttggaggaaagagttttaggccttctggagggactgaagatcatactcaacaggattcatcctggagctgttgaaaatgactatactttctggtctggatggtcagatttgcagtcatctgatgaagctactcgtaacattgctttttatactatgggccgttgcctgcgcagggatacacacaaagttgataattatctcaaggttttgaaatgccgagatatccataataacaactgctgagctcaaatccttaaccactgtcatggagaaggtccagacctcaaagttccattgagtctttaccttttggttcattccttggtttaatgggcatgttattcaaaaataaacattgattctttgaaatgcttaattcaaa

SEQ ID NO: 4641 - DNA, 600 bp, Mesocricetus auratus
  misc_feature (349)..(365): n is a, c, g, or t
  misc_feature (479)..(510): n is a, c, g, or t
ataaaatccagttggacctgttactggaatttgaggacagctcaacattacagaagcatcctccaccccaagaaatggcatattcatcctgtgttttcctggccctgaagcaggatgaagcctttccttgccatcattttttgcttcttgatcctgggagttgacagccaaaggtggttccagttcatgaaagaagctggccaaggtaaggacaaaggatgggggcaggaggttgtacgtgtgaggtttcaagtacttaccagagcagggaccacataattaagggaaaacatccttgtgaagtccccatggacagagaagcagtgtctctcttcccgtgtagttctgnnnnnnnnnnnnnnnnnttgacctttttctgtgaggatccgaagcctgagatcacgtcctgatgtgtctgcagctttcccacaggaatgtaggaacaatctgtccttgtaagatgcagattcaccagccannnnnnnnnnnnnnnnnnnnnnnnnnnnnnnnacgatgaacagctcatttctatgtggctgtgagacaaagtgtatctcaaggtgctacaatattcagaccaggcacaggaacaactgtgag

SEQ ID NO: 4642 - DNA, 1400 bp, Cricetulus longicaudatus
acctatggagtcaggcccttgtttaaagccatgacagaagatggatttctggctgtgtgttcagaagctaaagggctcgtttccttaaagcactccacaactcccttcttaaaagtggagcccttccttcctggacactacgaagttttggatttaaaaccaaatggcaaagttgcatctgtggagatggtgaaataccatcactgcagagatgaaccactgcacgccctctacgacagcgtggagaaactcttccaaggctttgagttagaaacggtgaagagcaatcttcgtatcctgtttgacagtgctgtcaggaagcgcttgatgacggacaggaggatcggctgccttttatcagggggcctggactcgagcttggttgccgcctccctgctgaagcaactcaaggaggctcaagtacagtatccactccagacatttgcaattggcatggaagacagccctgatctactagccgctagaaaggtggcaaattatattggaagcgagcatcacgaagtcttatttaattctgaagaaggcattcaggccctggatgaggtcatattttccttggaaacttacgacattacaacagttcgagcatctgtaggtatgtatctaatttccaagtatattcggaagaacacagacagcgtggtgatcttctctggagaagggtcagatgaacttacacagggctacatatatttccacaaggctccttctccagagaaagcagaggaggagagtgagagactgctgaaggaactctacctgtttgatgttctccgagccgaccgaactactgctgcccacggtcttgaactgagagtcccgtttctggatcatcggttttcctcctattacttgtcactgccaccagaaatgagaattccaaaaaatgggatagaaaaacatctccttcgagagacgtttgaggactccaacctgctacccaaagagattctctggagaccaaaagaagccttcagtgatgggatcacctcagttaagaactcctggtttaagattctacaggattatgttgaacatcaggttgatgatgaaatgatggcaacagcagcccagaagtttcccttcaatactcccaaaactaaagaaggctattactaccgccagatctttgaacgccattacccaggccgggctgattggctgacccattattggatgcccaagtggatcaatgccaccgatccttctgcccgaactctcacccactataagtcagctgccaaagcttagatattctctaaactctagtgtaaaagtgttcttctcactctgaaggcagagaccgtgagacaaacacagtaatgcaaatcaaccatcaactgctcaggcttacataggcatggaaagaaataaaaaca

SEQ ID NO: 4643 - DNA, 249 bp, Cricetulus sp.
cagcagctgagagttagtcctctgtcccttgcagggagagcatcctctggacgcaggattgcctgttccatttattagctgtcagtcatgggtcagctgttttcttcacctaaggatgaacagcatgaagatttggcctccagctttacccaatattttaagaagtttaagacagtagacacaatcattcctcaggaaactctggcttcaattgggtcaagcctgacaagaggaaacattcaggtagtc

SEQ ID NO: 4644 - DNA, 242 bp, Cricetulus sp.; identical to SEQ ID NO: 1002

SEQ ID NO: 4645 - DNA, 906 bp, Cricetulus migratorius; identical to SEQ ID NO: 1003
  misc_feature (26)..(47): n is a, c, g, or t

SEQ ID NO: 4646 - DNA, 600 bp, Mesocricetus auratus
cttaccgcgcccgcctgctctccagcgccccgctcagcgagccacgtggaccaacttcggcgcgcggtgttcgcttggttccagtggggctcgccgcgcctcccgcttctcggtgctcgcctcgtctcagctccgaccccatggcggctctggtgttggaggacgggtcggtgctgcagggccggccctttggggccgctgtgtcgactgctggggaagtgggtaagcaagcccgagcggcgtgcctaacctgtccacccctcctgcacacccctctctccgattcggtggctccagctccctctcaccgctcacgaccgaagcagtcacctcctccgggatctgcagcgctcggggcagtgttccgaaggctgcccttgccagatctcagccctgcctctttcttcagtgtttcagaccggcatggtcggctacccagaggccctcactgacccttcctacaaagctcagatcctggtgctcacgtaccctctcatcggcaactacggcattccctcagatgaagaggacgagttcggcctgagcaaggtagtcacacccagtgctttctctacatcccttctcacgtcagaagttaac

SEQ ID NO: 4647 - DNA, 317 bp, Cricetulus sp.; identical to SEQ ID NO: 1005

SEQ ID NO: 4648 - DNA, 321 bp, Cricetulus sp.; identical to SEQ ID NO: 1006

SEQ ID NO: 4649 - DNA, 1400 bp, Cricetus cricetus
  misc_feature (301)..(330): n is a, c, g, or t
  misc_feature (1135)..(1176): n is a, c, g, or t
  misc_feature (1302)..(1320): n is a, c, g, or t
atctcacttttgccatctcccgtgagggccatgtatatggctttggcctctcgaactatcaccagcttggaactccgggcactgcatcttgcttcattcctcagaacttaacatccttcaagaattccaccaagtcctgggtgggcttctctggtggccagcaccatacaatctgcatggattcagaaggaaaagcatacagcctgggcagggctgaatatgggcggctgggccttggggagggtgctgaggagaagagcatacccaccctcatttcccgactgcccgtcgtctcctctgnnnnnnnnnnnnnnnnnnnnnnnnnnnnnntgtccaaggatggtcgtgtttttgcctggggcatgggcaccaactaccagctgggcacagggcaggatgaagatgcctggagccctgtggaaatgaccggcaaacagctggagaaccgagtggtcttaactgtatccagcgggggccagcacacagtcttactggttaaggacaaggaacagagctgatgaagtctttgtgggcctggcttctggcccccaacccaccttcacagaacaggaaaacagccagatgcaaattccagaaggcccctccccagccctgaacagctgtcatctcctgtcttacccatcaccaccacagaatcctttccttctgtttcgtcctcttttctagaatcatcctgagaagtacaggatgagggaggatgggaagggggtctcagaaggagtttgcttacttacgtccttacaccgttccctatattaccctacttcctgtggtcctagcaggccctggctcattgcctacaaaacccaaagcttggggtttgggtgcccatactctgaaaagttgggaactccgttcacacccccattcctatgtgccactttttctgttcctaacatcagtttaaaaggagacggatggtacagtcatcagatccagttgtcatggacctatgcctagagagatctggacaaaggcttcacaaggctggggtgaccctaagccaaatatttggctctaaacaggtgtccatgggcaaaaacagcgatccacttgaaagaaatccaactagctgtctcccaaaagcaccaaagcacccactgtctcttgggcnnnnnnnnnnnnnnnnnnnnnnnnnnnnnnnnnnnnnnnnnnggactggaaagccatgctgggctctgctgggcagtcaaggcagggtactggggaagcgtggaggggaacacttggagggacggaggctggtcctaagaaaaggaagaacagtggttgagacagtannnnnnnnnnnnnnnnnnnaattataaagtattttggaggggagagtgaaagtcttttaacactttgaataaatttagagttttataaaaatggaattc

SEQ ID NO: 4650 - DNA, 600 bp, Cricetulus griseus
taataaagatacccgaataggtttttacatcttaagagaaaaatctactaataaatgacttggagcaggtccttcacagacaatatttagtgagagtaggtagcctcatgtgggttagtagttccagttgcttcaaaatgccctcaccttttgtcataggctcatgtggaggatctactccattggatggtgatattaaaagtagcacatgggtacatgccttaagatattaagatccccaagtaaaaactgcatctcagatgctctctgtttcttgggccatgatatgggcagtgagatttctgtcacacttgccaggaaacacttatgatctgtctgtcacaatctcttatattgtcaagtacttaaccaaacacaatcacccatgacctctcatatcctcctggacttagacaggaggcacaagtctactcaggtataaatatttttacttctgatgccccacagtaacctacaatggcttcagtccagtacacaggtaagtaaacccaccaatataccattccagctgattgataacctcttagatacatcccatatgctgcagttcccaaatggagacaacccaaagtttcttga

SEQ ID NO: 4651 - DNA, 600 bp, Cricetulus griseus
tgaaatggagcgatctttacatgatgctctttgtgtggtgaagagagttttggagtcaaaatctgtagtcccaggaggaggtgctgtagaagccgccctgtccatataccttgaaaactatgcaaccagtatggggtctcgggaacagcttgctattgcagagtttgcaaggtctcttcttgttattcctaatacactggcagtgaatgctgcccaagactccactgacctggttgccaagttacgagcttttcacaatgaggctcaagttaacccagaacgtaaaaacctgaagtggattggtcttgatttgatcaatggaaaaccacgagacaacaagcaagcaggggtgtttgaaccaaccatagttaaagtgaagagcctgaagtttgcaacagaagctgcaatcactattcttcgaatcgatgatctgataaaattacacccggaaactaaagacgataaacatggaagttatgaaaatgctgttcactctggagcccttgatgactgattggatttcccttttatttatagcagtgtcaggtgcaatgtagccttgggtatctcacattaaagtacagtgagctgtccacctga

SEQ ID NO: 4652 - DNA, 600 bp, Cricetulus griseus
aatgacattttttcttcttgcagaggatgtcacccccatcccctctgacagcacccgaaggaagggtggtcgtcgtggtcgccgtctgtgaacaggacttctcaaattattttctgttaataaattgctttgtataagctattttggttctgatgtttgtttgttttgaggcaggatctctctccatgtctatgtagaagagtctggcctccaactcagatccacatacctgtctctgcctcccaagtactggggataaaggaatgcaccaccacaccccggtgaccttaggggccacccagggcaacaccaaggcagtgttttgaggggatgttaagattgcatgtaggagcttctaatgtaggttgggggttggcaaacctgggtttgcaggctggctttctgagaatgggaacctgagagaggagatgctgaggctgccactctggcattaatttgccagccagtattttcaaagtggaactgttagtagcccatgctgtcatgggacagctaaacaccacacacacacacaccccaagcagggtagtagagatcacaagttggaagccagtttaatatggtctacttggggaattc

SEQ ID NO: 4653 - DNA, 311 bp, Cricetulus sp.; identical to SEQ ID NO: 1011

SEQ ID NO: 4654 - DNA, 600 bp, Cricetulus sp.
  misc_feature (30)..(66): n is a, c, g, or t
gattccagcactcacagaacagcttgcgtnnnnnnnnnnnnnnnnnnnnnnnnnnnnnnnnnnnnncactaaccagtgcaagttggtaaataaactttaaagaggcataacaaaaaccttatctatcacaagtatatattagaaaaacgtttttagttaatactcggaagagctacagacagaactgaccaccatccctagctcaccagttttcctgggacagcacatgagtgtgcacacatgtgcgtgcacacacacccagggcatggtgggaacctaggtgcacacctgtgtgcacacagtatgatgggagcctgggtgcacacgtgtgtgtgcacacactcacacagggcatggtgggagcatgggttgggaatcctccggacagccctagggttttactttccaagacccactctatgagcagggcaggcagagggaggcctggctcagtccatccggcctgcccactctacattctacaaggctgcctgctcagctctgccctgcccctgctcaaattccaaaaccctttcagaaatggtcaacactctaaacatccccctactccacagccacagcagaaaactctaaggacct

SEQ ID NO: 4655 - DNA, 600 bp, Mesocricetus auratus
cagtccaagatgttcaatgatgccatggacattctgaacatggtcttcacgggggtgttcactgtcgagatggttttgaaagtcattgcgtttaagcccaagcactatttcactgatgcatggaacacttttgatgccttaattgttgtgggtagcgtcgttgatattgctataactgaagtgaataactctgaagagagcaatagaatctccatcacctttttccgtcttttccgagtgatgcggttggtgaagcttctcagcaggggcgaaggcatccggactctgctgtggactttcattaagtccttccaggcactaccatatgtcgccctcctcatcgccatgctcttcttcatctatgcggtcatcggcatgcagatgtttgggaaagttgccatgagagataacaaccagatcaacaggaacaacaactttcagacgtttccccaggcggtgctgctgcttttcaggtgtgccacaggggaagcctggcaggagatcatgcttgcctgcctcccggggaagctgtgcgacccagactcagactacaaccccggagaggaatacacttgcggaagcaacttcgccatagtctat

SEQ ID NO: 4656 - DNA, 600 bp, Mesocricetus auratus
cgcacaggtgcaggggctgcgggcaaatcctacctctgacctcgggcttagttctgaggaagaagagacccctcacctgggggtaatgccccattttctacttatttttaatttttaaaatttagtacagaaaactcacactctaaaattgacaagaacaaaggctatatccctctcagtgaatatacatggttggtgaagccatcatgaattcgtggaagttccagttggattttacacattccttttgaaatataattcatgaacttatccagcaccaacacgcaaaaaaaaaaggatagaaagaaaatccaagacagatatataactggaaaacaattaaccttataacctgtttcaaaactcagacctgtactcagacctttctcattcccaatatttagcctttcttgttgtcttttcgtcgtcatgctatactgtacacatacgtaaacttatttacatatctgcatacattgctgactacatatgaggaaatacaatgtagattttctacctgagattgtatgacctcacttaatatgtacatgctaagttcatccagtttcctgtgtagttttgtagttacattgtttagag

SEQ ID NO: 4657 - DNA, 1400 bp, Mesocricetus auratus
ctgctcatggaaacacatccacaccctcattgttcctgtctctagccagggtctgctgtcagttctggaaacttcctagggtcagggtcttccctggtctctcacatcttttcttgtcacaggtggaaaaagagggaactatgctcaggctccaggtaactgtggggaaccggcttgtccctaaagcctgttgagtgaagctggttgggaaacccaacagcccataattcctcctccatccacatcctctcagtaaccgcaatggtccttgtcatttcttcttctgcagacagggacagtgcccagagctctgactcctctctggagacttgaaaaggtgacactctggggtcctgggttggggctgaggaacaaaggaaaagactggtgaagggaccagaccctcacccagcccccctgctttatcagccatgacaggctgcagaaaagtcatggaggcccctgactcagcacatgttggacttgctggtcctgcccaggtcactaggaggtcagataccaatcagaagttagctggtggactctggatgtgtttaaggctctgggcatgctttatggtaaaagtggtctaccagtgacttgcaaacacatgacaaccagttgaccaatcggcacaggacagattgcccagcacagaagtgcaccaatcctgagactgttgcttacccttagacactccccttatactgcctggcagtttctctgggtccttctcatgccaactgtcctgttggacatacgatggcccctagttaatggggttagctcattaaacaacaataactgactctttgcttttgcatcggaatgggtctcttggtgattttgggggttcagaatttaagcacaacactgtgtcccaggacttctcagaacttagacatttgaatgagtcacagtgggcgtttgagatgtctttatactgactgtccatcactctttgtctttagcttcagacagtggcctcacagggacacattctcactcaagaaagagcaatgttggaagctgtctgctttctcctgtgaagagcatccagcccggtcctgtccaccaggaccctacccctgcacggccccttctacctccacagtcaaccttcctggtccagcacaggcaggaggagacaactctatcctgtcacctgcatgcttccatgagctgcacaccttggcttccccactgaaaataaaaatctggatgtgaacttgatagttcatgtccttgacctctgaaagtgtgatggagaaaataaatggcagcatggagaatcttccagaacctgtgtctgctgtggtgactgtcagcggggacaggagtctgtgggagctgagtgagatggggctgtgacaggtagagctcagtccacgtggctttgg

SEQ ID NO: 4658 - DNA, 600 bp, Cricetulus sp.
gcaacatcagccctggatacagagagtgaaaaggttgtccaggaagctctggacaaagccagagaaggccgcacctgcattgtgatcgctcaccgcctgtccaccatccagaacgcagacttgatcgtggtgattcagaatggcaaggtcaaggagcatggcacccaccagcagctgctggcacagaaaggcatctatttctccatggtcagtgtgcaggctggagcaaagcgctagtgaactgtgttaaatatttttttaatatttgtattaacacatagcatttaaccaaagttaaaaagaaagtacgtaccagaataaccagttatctatttcctgtcattatgagaagcatttagtccagtttagagttttcagagactttgtaattaaagggacagaaatagatatatcatcaaatggaaaggaatcatttaaattgcactataaaattatacaagaattaaaagtaaatgtttcataatatatacttttatttatactttctcatttgtaactataactgatttccttgctaaacaaatcatgtgtgtatcaaaaattaatgaaatgtttgtataaagtatatatagtgaaact

SEQ ID NO: 4659 - DNA, 600 bp, Mesocricetus auratus
gacacccgcatgcagttggccatggtttgctacagccctgactttgagaaacgaaagccagaatacttggagggtcttcccgagaagatgaagctgtactcggagttcctgggcaagagatcatggtttgcaggggacaagatcacctatgtggatttcctcatctatgatgtccttgaccagcaccgtatatttgcgccaaagtgcctggatgcatttccaaacctgaaggacttcttggctcgctttgagggcctgaagaagatatctgactacatgaaaagcagccgctttagctgcaaacaaatctttgcaaagatggccgtttggaactcaaaataggacttcgaagcccagacctggctccccactcctctatttcttctcacaagcccttccttcagtcaagcctctggatcctactcctgttcctttgccctgccctgagtcctgccatccctcagtgctgtttggaggaagggccagactccagaatccagcgagcccgagagatcagatctgcctgtgtgctggctctggtccccagagtgagcaacggggccctgtttgatctccagtaaagtctgaatgacacggaat

SEQ ID NO: 4660 - DNA, 385 bp, Cricetulus griseus; identical to SEQ ID NO: 1018

SEQ ID NO: 4661 - DNA, 175 bp, Cricetulus griseus; identical to SEQ ID NO: 1019

SEQ ID NO: 4662 - DNA, 1242 bp, Cricetulus sp.; identical to SEQ ID NO: 1020
  misc_feature (1012)..(1041): n is a, c, g, or t

SEQ ID NO: 4663 - DNA, 1400 bp, Cricetulus sp.
  misc_feature (378)..(412): n is a, c, g, or t
cacccttcttcgctgaccagcctatccagatctacgagaaaatcgtctctgggaaggtgcggttcccatctcacttcagctctgacttgaaggacctgctacggaaccttctgcaggtggatctcaccaagcgctttgggaacctcaagaacggggtcaatgacatcaagaaccataagtggtttgccacgactgactggattgccatctatcagagaaaggtggaagctcccttcataccaaagtttaaaggccctggggacacgagtaactttgacgactatgaggaggaagagatccgggtctccatcaatgagaagtgtggcaaggagtttactgagttttaggggtgtgcttgtaccccatgggttttctttnnnnnnnnnnnnnnnnnnnnnnnnnnnnnnnnnnnggttgggggtgggagggttggatcgaacagccagagggccctagagttctgtgcatctaatttaacacccactccacccccaagttagggagagcaggaaagccagatattggggaaggggcaacatcagctgctcccccctcccccactgagacacccttctccccacttctctgcctgttttcaatgaatttctcagcttcagtcacacccagacttatggtgtatccaagggcagggtaaggaaagagaggcccaaattcaccccagcctccacccccactccagcactggacactaaggatgaacagaaatgccaaccaccccttccatgcagtcctacttggaaagggagattttagtgacaggtacagagggctgcttgctagtgggtttttggtttctttttttttttccttttcttttttaaatattcatttaaattaagttccaccagtgcctcccttcctccagactgtccctcccctaccaaaccccctctacaagcccccaatccactctgaggccgggatagccaactgactctgtcaaggaaggaaccgggctttgaacctcgccctgagctgctagcctcccggtccttttccaggggtctcatgccaattctttggcgcatcagcccccttaagaagcccctccccatcctgggcacctcacttctagcttagctgtcagctgtccatcacctcttgctctgctccccactcactgcacccccaagtctgattgtgcttttctctcaatagaaaggtggggagctgctggggaaattaccccatttatccctgtgtttatccctctcgtaacttctcccaaacaggaggagctctcaggcctgggtgggggccccgggtgggcgaggggggccattcaacctgtgtgctgcgaaggatgagacttcatcttgaacagtgtgctgttgtaaacatatttgaaaactattaccaataaagttttgttttaaaat

SEQ ID NO: 4664 - DNA, 1311 bp, Mesocricetus auratus; identical to SEQ ID NO: 1022
  misc_feature (499)..(540): n is a, c, g, or t

SEQ ID NO: 4665 - DNA, 600 bp, Mesocricetus auratus
tcgtggtcagttctcccgtggtgatagaattcctcttcccacataaggatgggcaagattctgtgactcacacttttgaagaggatatcgttactaccatccaggcctcctattccaagaaaaagctcttcttaagccttagcgatttccagattaaaccaaagatggcctccaacatggatgaggactccgcgtccatccagagcttcctgcagttgatgatcaccacagtaggcatccccgaggtcatgtctcggctggaggtggctttgacaaccctcattaacagtaaaggcctggatcttttcgacatcatcaaccccgagatcatcagtcgtgacggcttcctgctgctacagatggacttcggcttcccagagcatctgctggtggacttcctgcagagccttaactaggagactttaacaatggaggctgatggggctgggatcaaaggcgtgcacccaactcacaatggaactggagcgtcggattgctggcatctcctgtgtggggctcagagtggggacaaggagatggggactggctccctccttcctggattattaaaggcctactcattaaatgctctgaccagta

SEQ ID NO: 4666 - DNA, 600 bp, Cricetulus sp.
gctgagcaaaggcatcgcacagagttgcctaatatacaggcttccctgggaggtacgttgacctgcataagggttacctgccccgagactccctttcccagaaaaacggcagaggacaggtcgagagtacttcgggccaagctaacagcctgatggcgactctcgtacacagtcttaatgtttgatttgggaaggttcaacctctgcctctatccctcaacatatgggtgacctatttgcttgtaaaaatataaagccttatcattaattaataaaaaaagggggatatgtagggagccggttcctgcattatccattacaataatggtgcctgaagacaccaagatgtaaattacttcacaggcgctgggtaatctccattcctttgatctctgcctatcccgtggctcatttggcctgaggagctgaagccattcatagggtaacacgtcccaggcggctggccagcctttacaagggatggttttcttggttcagtgtctctgctctggtaagcttatgcattaaagcttgtctgcagaaggatctgagtgtcctgcgtgtatttcttgctggcgagaaaatacaacccgcgggaca

SEQ ID NO: 4667 - DNA, 1400 bp, Mesocricetus auratus
  misc_feature (1161)..(1225): n is a, c, g, or t
agccttcatcttcatcgatgaaacacacatcgcccatgccttcacctggctctcccagcagcagcaggacaacggctgttttaggagctctggatatctgttcaacaatgccatgaagggtggagtagacgatgaagtgaccctctctgcctatgtaaccatcgcccttctggagagttcactcgaagacacacatccggttgtctccaaagccctggcctgcctagagtcatcctggaagacgatacagcaagagggaaatgggaactttgtgtacaccaaagcgctgctagcctatgcccttgctctggcagggaaccaggacaagagaaaggaaatcctgaaatctcttgataatgaggctatagaggaaaaaaactccgttcattgggaaagacctgagaaaccgacgaaaccagagaggtgtctgtacgaaccacaggctccctctgctgaggtggagatgaatgcctatgtcctcctcactctcctcactgcccagccagccccgagccctgaagacctgggtttggcagtgcgcatcgtgaagtggctcacgaagcagcagaattcccatggtggcttctcctccacacaggacactgtggtagctctccatgctttgtccaagtatggggcagttactttcgccagaagtcagaaaactccttcagtgaccatccaatcttcggggacattttccagaaagttccaaatagagaacagtaatcgactgttactgcagcaggtctccctaccagacatccctggggactataacatcagtatgtcaggagaaggatgtgtgtatgctcagacaacactgaagtacaatgttcacttggagaaagaggagtctgcattcactctacgggtgcagacagtacctctgacttgtgataaccccgaaggccacaacagtttccagatctcactagaaatcagttacatagggagccgtccagcctccaacatggtgattgttgatgtgaagatggtatctggcttcattccattgaaaccaacagtgaaaaagcttgaacgatcagagcatgtgagcagaacagaagtgagcaataacaaggtcttgttatatgtggatcaggtgaccaatcagacactggccttctcctttgtcgttcaacaagacatcccagtaannnnnnnnnnnnnnnnnnnnnnnnnnnnnnnnnnnnnnnnnnnnnnnnnnnnnnnnnnnnnnnnngaatacagcgccccctgcagttcagagaaacaaaacttttgaaactccaatctgtggacaagccattgctggaatccccaaaccccttcaagatggtgatttttgcctgtgtctgcaatactaattctgaacaagcatgatgaataaacgcacacttctagacagtcaggaattc

SEQ ID NO: 4668 - DNA, 600 bp, Mesocricetus auratus
  misc_feature (325)..(351): n is a, c, g, or t
cgctgtcaccgctgcacttcatagggacacagttgaaaggtgggacaagctgctgaccaaaaggctggtgaacctgtacatccccagagtctacatgtctggtacctacaacctcgaagatgtgctggagggcatgggcattacaggcttattcaccaaccaaacagatttcttagacatctcccaggatcctccacagaaagcatcaaagatagtccacaaggtcatgctgcaactggatgagaaagatgaaccgcctgttaccaccacagaggctcccccacagacaacatctgaaccgctcaccctcaccttcaacaaaccnnnnnnnnnnnnnnnnnnnnnnnnnnncacttggagcagcctgttgttgggcaaaatcatgaatccagcttagtgcatgctggagaagctatggtaccgcctgactttggggggtagaagcctttccccagtcttctccaggttcttccgaacccaactaggtatccctacttttagatatcctgtaatgtataaccattgttgctactcccaagacaggtcaactgataaagtagcactgagatagagggaactgttattaaagggtgtttttgc

SEQ ID NO: 4669 - DNA, 600 bp, Cricetulus longicaudatus
cacagaaatttggatttgaagtggggccggcttgcttcctaggttaggagctgctgagcccacggtcttcagagcaacctcgtgacctcagcaccccacctgtgggtgtcctgtgcacggcccatcctggacagtgaacatttctcacccctgcctgcctgactcatctgtgcctcggaccctccgtggcattggaccccacaccaatgagaacaaagggaaagagccgtgttcccacggagccgaatcacatgacctagccacaccacagcctcttgccacactgcaggcctggtccccagctctcctaataggttcatcaaaggtgttcgtgaactgttggccgggagtcagggtggggcagtatttggaaatcactttaaaaaaaccaacttgaaaatatgtattccccttgaccttcaaaagatgttctaaggtggtcttgtaaaggtcgccaaagccttctctttttttgtttttaaacaaccctcaatacatccactcagaggccaaatgtcattccacgtgtgcctttccgatggattaaaggtgcttatgtttttgtgagagttttaagtaaatatttgtattgtattgtta

SEQ ID NO: 4670 - DNA, 600 bp, Cricetulus griseus
aacgtacagctctgttgtgttggtatctctgtggagacagaaatcggtggggagcgtgggggctggaggagccagggtgtcgagccactgcttacggtataggggtttgctctacagatgactaaaatgtctgggaactaaagctaagtcatatttgtagttcttgcactggagaggctgaggcggaagaatttcagagagttcaagttcaagtgaataccaggatattcaagcacataaaataataataataaataatcaaggaagaattggggctaatgttttgcaagtttttgttctcttccatcttatcgaagtaggaaaatcctagctataaggtaaggtctgctaatcagccaatgggagcagctactgtcaatcacaaaaccccacctacctctccaggaaggtgattagtcctctgagagtcaaggcatgccttgagtctcaaggagcaagaagtgtaccaagccctaagttagggcaccttgccaggaagcctggtctgtcatatccccaatgtctccctgtccagccagaggacaagtagtcctaacatggccactcagctctgcaaaccagagctcccagaaggaattc

SEQ ID NO: 4671 - DNA, 600 bp, Cricetulus griseus
  misc_feature (413)..(434): n is a, c, g, or t
  misc_feature (452)..(465): n is a, c, g, or t
  misc_feature (467)..(479): n is a, c, g, or t
gctgtgctgtcattttcagatggcggaagccggcttcatccactgccctaccgagaacgagcctgacttggcccagtgttttttctgctttaaggagctggaaggctgggagccagatgacaaccccatgtaagtccctggtgccccggttccaatgggaacttactgggttgaactggagttggggggaaaacgatttgaatttagtaggagagcatggtcttcctaactcgttacgtgttccaggctgtccttgaacttgttatatacctaagactagtcttgagttctccatatctgcctcggtttccctagtgctgccagcttgcatggttttgcctgaggtatttgttttgatttttgtttgtttgggatgggtttctctatgtagctctggttgttcaagaactttnnnnnnnnnnnnnnnnnnnnnnaaactcagagattttcgnnnnnnnnnnnnnncnnnnnnnnnnnnngtggtgtacgccaccacggcctggcctgcctgagatattttaagattcaggtgtttgtttgttttggctaatatgccacatgcatgtcttcatttctgccaccggtgtgggtgtcggatcc

SEQ ID NO: 4672 - DNA, 600 bp, Mesocricetus auratus
tggttttctgaaaggctgatagacaattcctgatgtctcagaatctactgattttgtctgtccttcatggaagattgtttctggctaaaaaggctaaagaagcctgtgtagacttgctggtggactgtttagaggaggggtgtggggaaaggaacttagattcatccaatcacttcaccttcaagggggatagtgaggacccagataatgagttgttgcattcatcaaaatcattgtcacactggagtagcagggcacacggcgcagctgaactcaaggctgccctggcctgctgagtaagaccctgtggtggtttgaaagaaaatgacccccaaaggaagtgcactaatagaaggtgtgatcttgttggagtatatgtggtcttgttaagggaagtttgtcactgtggaggcaggctttgaagtctcatacatgctcaaggcatgcccagtgaggtagaccacttcctgttgcctgcctatcaagatataagactcaactccagcaccatgtctgcctccatgccaccgtgtcacacaatgataataatggaccaaacctctgaaatgtaagccaccccaattaaattttttttccttt

SEQ ID NO: 4673 - DNA, 148 bp, Cricetulus longicaudatus
gctgacccggcacatcagaatccacacgggccacaagccctttcagtgtcggatctgcatgcgaaacttcagcagaagtgaccacctcaccactcacatccgcacccacaccggggagaagcccttcgcttgtgactattgtggccgc

SEQ ID NO: 4674 - DNA, 413 bp, Cricetulus longicaudatus; identical to SEQ ID NO: 1032

SEQ ID NO: 4675 - DNA, 600 bp, Cricetulus longicaudatus
  misc_feature (324)..(373): n is a, c, g, or t
ccaatgattgtgagctcccacgctggcacatgcatgacttcttccactccttcctgatcgtgttccgtgtactgtgtggagagtggatagagaccatgtgggactgcatggaggtcgccggccagaccatgtgtctcactgtcttcatgatggtcatggtgattggcaacctagttgttctgaacctcttcttggccttgctcctcagctctttcagctctgacaaccttgcagccacagacgatgataacgaaatgaacaaccttcagatagctgtgggaaggatgcaaaggggaattgactttgttaaaaggaagatacgtnnnnnnnnnnnnnnnnnnnnnnnnnnnnnnnnnnnnnnnnnnnnnnnnnncaaaccccttgaagatctgaataacaagaaagatagttgtatctccaaccacacgaccatagaaataggcaaagacctcaattacctcaaagatggaaatgggacaaccagtggcataggaagcagtgtggagaagtatgtggtagatgagagtgactacatgtcattcataaacaaccccagtctcactgtgaccgtgcccattgcccttggagagtctgactttg

SEQ ID NO: 4676 - DNA, 598 bp, Cricetulus griseus; identical to SEQ ID NO: 1034
  misc_feature (395)..(448): n is a, c, g, or t

SEQ ID NO: 4677 - DNA, 600 bp, Mesocricetus auratus
  misc_feature (547)..(561): n is a, c, g, or t
ctccagcagcctggtgttgtaccagagctcggactccaccaacgggcatagccacctgctgccatccaaccatggtgtcatcgagacttttatctccacccagatggcctcctcctcccagtaaccatggtgatggcctctcaggagctgggttcccagagcccacactgcctgcatagggggtgagaaggccaaggccatgctgcctggaggacatctgcgactgccatgtgtctcctgccgtaggctggtggccttcccatacacccccgctttcaccccgacttctccagcagcatcagagagggatggctctggggggagtctcaccctgagaagggaccataaagggcttgaggacagcccggtctggacagcgttggaagaccatcctcctgcagagaatagggaactcgacacttgggacaaaggggagcctgtgatgctggtacccacacaggatctctgtgttgagcttgggggcctagatccacatggctgcctcctgtctcctgtgcaaccccaggccatcccacgagcaccagcnnnnnnnnnnnnnnnacatggctgtttggcggtcacctaccccagcccagacag

SEQ ID NO: 4678 - DNA, 1400 bp, Mesocricetus auratus
ggtgaattacatctactttaaaggaaaatggaaggcgccctttgaccctgatttcacatatgagtctgacttctacttggacaacaagaggtctgtgaaggtgcccatgatgaagcataaggacctgaccacaccctacttccgggatgaggagctgtcctcctatgtggtggagatgaggtacagaggcaatgtcagtgccatgttcatcctccctgacaagggcaggatgcagcagctggaatccagcttacagccagagaccctgaggagatggaaggactctctgagacccaggatgatccatgagctctatgtgcccaagttctccatctccactgactacagcatggagggcatcctttcacagttgggcatcaaggaagtcttctcctcacaggctgacctgtctgggatcacaggggacaaggacctgagagtctctaaggtcgtccacaaggctgtgctggacgtgggtgagacgggcacagaggcagcggctgccacaggcctcaggatgatgggatcagctctaattatgaaccctctgagactgcgtttcaacaagccgttcctgatgattatctataacacaaacactcagactccactctttatggccaaagtcacaaatcccaagcaaaactagaacatcccaagtgctgaggcttcttcccaggagccagggattaatcctgtatgagagtatctatctgcatttttgcttccatgctctgattggctgtggcatgcctggattggacaatgacagtaactaactgtatgactgccacatgcacagagtcctggggacagtcagtgtcaggctcccagtcctcttggcagcactagctcatattcctgaagctgaaatctatccttgtggccactccttcccgccactattttatctgcctctacacaaaagcctgggccctggaaggtaggctcacccctgtctaggctcttgttatgtctacattcagcttccacagccttcatggaatcatgcaaacttataggtgaaccatgtgtccctcagccccaggacacagaagggaacccgctaccatgagtctatttccagcatctggggaccagttggtgtccagttcctgcctcacacctttcctcttccattcactgtcccttcaggggatcctcacacttcccacatctggcacagtgttggagccctcactcctgcagctgcatggagcctgtccttcagatcagctcccttctcccttctatacctacttagggtagaggagcctttctctagtttcctaatgaccacactcacagaacagaaagactcctcttctttccttacccaaactggagggcttgaagcaaaagatcaataaacataactgcatgaaaagtgaaaaaaaaaa

SEQ ID NO: 4679 - DNA, 408 bp, Cricetulus sp.; identical to SEQ ID NO: 1037

SEQ ID NO: 4680 - DNA, 117 bp, Cricetulus griseus; identical to SEQ ID NO: 1038
  misc_feature (31)..(56): n is a, c, g, or t

SEQ ID NO: 4681 - DNA, 429 bp, Cricetulus griseus
cggcccgagaacaagcaccgggtggggccggcccgagaatgagcaccaggtgggccagcccgagaacgagcaccgggtgggctggcacgagggcgagcaccaggtgggtcagcacgagaacaaacaccgagtgagccggcctggagctctgcccctgagcccccgccccgcccgaagagaaacactccgtcccaaggtctccgcccccaaggtcaggccatcaggaagggggggggggaattgagtctgctgtaccagacaccagaccttgagaatatgctgatctggaatggctctgtgtctcatttgaaccatccaatagaaataattctgtatttcgcctcatttgaaagactctgtgtttcacctcatttgaataactctgtacttgcctcattgaataaccctgtatagcgcctcatatacatt

SEQ ID NO: 4682 - DNA, 425 bp, Cricetulus griseus
  misc_feature (370)..(390): n is a, c, g, or t
tacgttatgctctgatttgaaatcagctgtctttctttttcagattagtgatgatgaaccaggctatgacctagattttgcccagcgatgatggcagacacaaaaacccaacctcatctttggaggttctttgcctcatagcattaaattggggcttttttttttcttaccttataggtcctttgcatatatattatagcttccagatttgtgtttttatgggattttgtgtgtgcaaatgcatgtgtctatatgtgtttcttgtgctttttctttgcctccttttcttgtttgtggtttattctgattggaaaaggtgtttattcctcatggagtgattatggacaggtaagtaagatcttaattgaannnnnnnnnnnnnnnnnnnnncggttaagagcactgactgctcttccagaggttct

SEQ ID NO: 4683 - DNA, 1400 bp, Mesocricetus auratus
  misc_feature (456)..(501): n is a, c, g, or t
  misc_feature (579)..(609): n is a, c, g, or t
  misc_feature (933)..(964): n is a, c, g, or t
  misc_feature (1091)..(1107): n is a, c, g, or t
gactcatatggtggtggttttgatgcaaaccagtctttggtaggagacattggagatgtgaacatgtgggacattgtgctgtctccagaacagataaacacagtttgtgttggtgggacactagaccccagtgttttaaactggcaggcactgaagtataaagtacagggtgatgtgtttattaagccccagctgtggccctgacctactgttgtgagccctgagacaacccttgggattacattgtcttccttgtctctggttatagaccttttaaccccaacagatgctgtagttctattctgtgaatatggtctttcacttccctgctctgcctttcctcagcaccagagcatgcaatttaagtgtatggcttggcagtatgtacatcatattaggaatatttatcaaagagaatcctaattacatgtttttgtttatatacacactataagnnnnnnnnnnnnnnnnnnnnnnnnnnnnnnnnnnnnnnnnnnnnnnatttccaggtgtaacagccccggctgacctggaacttgctgtgtagaccaggctgacctcaaactcactgagatccannnnnnnnnnnnnnnnnnnnnnnnnnnnnnngggcctgtgctatcactatctggattttttacatatatttttaattgaaagaattttaaacaatccctcaccctcacaaagatgagaaaccacacagaaagaagaatgaaaattttaatttaatctttttgtttttaaaatttcatatatgaatgctatatttacttcatttatatccctccctctccaaatcttcctgtatcttgacctcttatttattagctttatatgcatacacatacattatatacacaatatctatcatctatgtatctatgtatgtaagtacaatgtatctatgtgtctatgtatctatgtatctannnnnnnnnnnnnnnnnnnnnnnnnnnnnnnnctatcattcatccatcctactggttccatttagtgttgcttgtacgctgttgagggttggtcacttgggacttggataatctattagatggcacacccctgaagaaaacggactctccttttctcannnnnnnnnnnnnnnnngtagctcttcatataggggtggggctttgtgaaatttcttctgtccatgttgcatgctagtgttgtcattatgtaggtcttatttaggcaacccagactgatgggggaccgactatactgggctcagagttagtccttttctggaataaaaatctgtatctgaacttcctgggtccatgagtcaataaagctacctttggtttggatgaattggagttattgcatgattcattttattatcaaccctctggaataaatagtctgaagttcaggctgactgtcacttccctgca

SEQ ID NO: 4684 - DNA, 312 bp, Cricetulus sp.; identical to SEQ ID NO: 1042

SEQ ID NO: 4685 - DNA, 866 bp, Mesocricetus auratus; identical to SEQ ID NO: 1043

SEQ ID NO: 4686 - DNA, 809 bp, Mesocricetus auratus; identical to SEQ ID NO: 1044
  misc_feature (358)..(380): n is a, c, g, or t

SEQ ID NO: 4687 - DNA, 571 bp, Cricetinae gen. sp.
gctttccggtgctgcccctgggtgacgcccactgaggaagacagactggagctgactcgcactccatccctctccaggagagtcaacaggtgtcacacaaaagagactttgttcatgactgcggacatgacccactctgaggctaccaatggccaggttgggagtccccaagatgtggagcctgccgcaccctgaagtcttgagactgtctgcagggccaggcttagtccctttgagaaacagctgatagaaaaggcctgatgtaatagcttgtcccacactccattcttcaaccaccaatagaaaaacaagatggtgcctggagctccacaggcaatgctaatacaaagagctcacatacccaccataagcattcctgggatggaggaaagagccaggaagacagggagccaacacttggccaatctaggagctgcaaagtgaaatgtctccctgcagtataaagatggatgggaaaactggatctcattaaagataactgcaggtgtcatgagaagaggcagttgaagggatgatgagatggtaaaggcacttgctgcctagcctggtg

SEQ ID NO: 4688 - DNA, 540 bp, Cricetinae gen. sp.; identical to SEQ ID NO: 1046

SEQ ID NO: 4689 - DNA, 600 bp, Cricetinae
tgcgcggcccctgcaaatggcagccgagcccatctccgctaggcagccagccctgcggcctcacgtccacaagcagcctgagaagaccacccgcgtgcggactgtgctcaacgagaagcagctgcacaccttgcggacttgctacgccgccaaccctcggccagatgcgctcatgaaggagcaactagtggagatgaccggcctcagcccccgagtgatccgagtctggtttcaaaacaagaggtgcaaggacaagaagcgcagcatcatgatgaagcagctccaacagcagcagcccaacgacaaaactaacatccaagggatgacaggaactcccatggtggctgctagtccggagagacatgatggtggtttacaggctaacccagtagaggtgcaaagttaccaaccgccctggaaagtactgagcgacttcgccttgcagagtgacatagatcagccggcttttcagcaactggtcaatttttcagaaggaggaccaggctctaattccactggcagtgaagtggcatcgatgtcctctcagctcccagatacacccaacagcatggtagccagtcctattgaggcatgaggact

SEQ ID NO: 4690 - DNA, 600 bp, Cricetinae gen. sp.
gacgccatcagagccaactcaattgagctcaccgctgggagtgtagacacgacaaccttccccctggtcatggctctctttgagctggctcggaacccagatgttcagcaggctgtgcggcaggagagcctggcagctgaggccagcgtggctgcaaatccccagagggctatgtcggatctgcccctgctgcgggctgtccttaaagagaccttgaggctctatcctgttggtggctttttggagagaattctaagctcggacttggtgcttcagaactaccacgtccctgctgggacattggtcctactttatctctactccatgggccgaaaccctgcagtatttccgaggcccgagcactacttgccccagcgctggctggagaggaatgggagtttccagcacctgaccttcggctttggggtgcgccagtgcctggggaagcgcctggctcaggtggagatgctcctcctgctgcaccatgtgctgaaatccttcagggtggagacgcaggagcgagaggatgtgcggatggtgtaccgctttgttctggcgcccagctccagccccctgctcactttccggcctgtcagctag

SEQ ID NO: 4691 - DNA, 292 bp, Cricetinae; identical to SEQ ID NO: 1049

SEQ ID NO: 4692 - DNA, 1217 bp, Cricetinae gen. sp.; identical to SEQ ID NO: 1050
  misc_feature (577)..(595): n is a, c, g, or t

SEQ ID NO: 4693 - DNA, 600 bp, Cricetinae gen. sp.
tcaacctgctctctgggatgtaacctgcctcagattcataacatcagaaacaagagagccttgacactcctggcacaaatgaggagactctcccctctctcctgcctgaaggacagaagggactttgcattccctctggagaaagtagatgtccagcacatgcagaaggctggagccatccctctcctgcaggagctgacccagcaggtcctcatcctcttcagctcaaaggactcatctgctgcttgggagacaaccctcctagacacattctgcactggcctctaccagcagctcagtgacctgaaagcctgtctgattcaacaggtagggattgaggaacctcctctgagccaggaagactccctgttgactgtgaggaaatacttccacaggatcactgtctacctgagagagaagaaccacagcccctgtgcctgggaggtggtcagaacagaagtctggagaaccctgtctgccacagcaaacttgctggcaagattgagtgaggagaaggagtaagtcctgagccaaagtgaacagaactctcctgaactaggacactgcacctcactcctcagattctccaggccagaagtc

SEQ ID NO: 4694 - DNA, 171 bp, Cricetinae gen. sp.; identical to SEQ ID NO: 1052

SEQ ID NO: 4695 - DNA, 404 bp, Mesocricetus auratus; identical to SEQ ID NO: 1053
  misc_feature (117)..(140): n is a, c, g, or t

SEQ ID NO: 4696 - DNA, 249 bp, Mesocricetus auratus; identical to SEQ ID NO: 1054

SEQ ID NO: 4697 - DNA, 534 bp, Mesocricetus auratus; identical to SEQ ID NO: 1055
  misc_feature (182)..(239): n is a, c, g, or t

SEQ ID NO: 4698 - DNA, 146 bp, Mesocricetus auratus; identical to SEQ ID NO: 1056

SEQ ID NO: 4699 - DNA, 600 bp, Cricetulus migratorius
cagtcactgtccctcagttgctctgtcactggttactccatcagcagtggtaccttgtggacatggatcaggcagttcccagggaataagctggtgtggatggggtacataggctatggcgggggcacggattataacccatccctcaagaaccgcatctccataaccagagacacgtccaagaatcagttctcccttcagctgaagtctgtgaccactgaggacacagccacatattattgtgcaaaaatttttgggttcaatgctttggattcctggggccaagggatcctggtcaccgtctcctcagccacaacaacagccccatctgtctatcctttggcccctgcctgtgacagcacaaccagcaccacgaacacggtgaccctgggatgcctggtcaagggctatttccctgagccggtgaccgtaatctggaactctggagccctgaccagcggcgtgcacaccttcccatctgtcctgcattctgggctctactccctcagcagctcagtgactgtaccttccagcacctggcccagccagaccgtcacctgcaacgtagcccacccagccagcagcaccacggtcgactta

SEQ ID NO: 4700 - DNA, 577 bp, Cricetinae
tttatttgttattctttaatgatccacatgaacagtatttattacgtgttaaggtcttgggtctttaatgtgaagattttcttttaatgcttctaaaattctgttttatatattaacttacactgtgtgccaagtgttttaaaggtttatttgccaacgattatgaagaggaacattgatgtatctgagctgcttgggtttttgaaaggtcacctggatacttgagttgcatcatccctgtatttaaattgagctttaataaattgcttcagtccaaaaattacaggaaaggtgtattcttaattgatgaacgaattgatttctttttcaaatggggacctatttgcattccaaaaggggaaaaccatcacagagatagatcttgtaactgagaacctgctaggcaaatatattttccaggttgtgctgtgctttttgaaaggcctaatttaattgattttaatatagatgtacatatataagttattctaactgtgaagacttactacgttaaaagactgctttgattcgcttatgttgtgaaatcatttgttatttttctaaaaaaaatctaaaa

SEQ ID NO: 4701 - DNA, 600 bp, Cricetinae
tgctgcagccgctgtggctgcaggcctgggcctggaggcgggccccaaagaagaggcgggcatcattcggatgctggagtttggtagccatctggatctggagcgcatgcaaggcaccctcccgctggacaatatctcctaccgcagggagtctgccatctgacctccaggccctgccctcctctattcctgcaagagcctctgccacgggtggggatccaggacaagcctcccactctcaggacagagttggacccggaggaaggtgggggcttcaaagactgggagatcccttcccgttgactgcagagcccaggactgggaaggaaggacccaggtactcagccctgctggcctgagccccgccccccagcacctccccacaggtggctctgggcccccagaccttccaccctttccccactgacccttcaaggatgcgtcccttctgttctcaggaccttggggaaggcggctggactgctggggggtgggcatcatgggagttctgggtgggcagggtgggcctggggagggggaggggtgtgttttttttgcatgaccatggtctgtgcccttgactcccttttgtaaatatct

SEQ ID NO: 4702 - DNA, 600 bp, Mesocricetus auratus
gaggacacaaaaggaatcaagttaccggacagtgaccaggaactgtaccgcaactttcctctcaccatctcggagcggtggcagcaggaggtggcagagactgtttttgacaccatcaatgctgagacagatcggctggaggcacgaaagaaagccaaaaacaagcagctgggccatgaggaggactatgctctgggtaaggactgcatcatgcatggctacatgtccaagatgggcaatcccttcctgacccagtggcagcggcggtacttctacctgttccccaaccgacttgagtggcggggtgaaggcgaggctccgcagagcctcctgaccatggaagagatccagtcagtggaagagacgcagatcaaagagcgcaaatgtctcctccttaaaatccgtggaggcaagcagtttgtcctgcagtgtgatagtgaccctgagctggtgcaatggaaaaaagagctgcgtgatgcctaccgtgaggcccagcagctggtgcagcgagtgcccaagatgaagaacaagccacgctcacctgtggtggagctgagcaaagtgccgctgatccagcgtggcagtgccaacggcctctga

SEQ ID NO: 4703 - DNA, 600 bp, Cricetinae
ttccggcctgtcagctagtcagtcagctttgcagctggggttccagtcaggccagcagctccctcctgtcctgatgacaagctgccctcatttctaccttgggccaccatgcctgtagccacagctaccttcttgtctaggctctggaggattactgcccctcctctgtcagtcccttcacccccagcctccacctcaactgtgatcattcaagtgagcccatatgctggctttgctttcctctctggtcccaaaaatccctgtcactctcttcctgaaccctctcttaaagtttcttcgtatggtttgcacattgtcgaatactaacccagcatcagcaaggacatctcatgtcaacagtgaaagcccaggattcactcatgacacattctcatgcctgaggagagacagaactggccaagtgtatgctgcacaccccagacgtcatgtggtgtggcggagtcaggggcgcagtggatgctccctggtcagcttccattccagacattgtgccgatcttgaggatgctgagagggctaagggctcaagaatggccaaacaaaacggaaacaaacaacacacataaaagcccaacaaaca

SEQ ID NO: 4704 - DNA, 600 bp, Cricetulus griseus
ctgaaatttttgacaaaagtgggacttatccatagagttcaaacttattcttgggaggaaaactgaatttacatagatagatatgatcaatcatcactaatatattatcagaaaatatctaaagacctaactgaatgtagatcagactggaaaccttgttatagtatgctgaattcagaaacaagcacttttatatgttaaaatataacagattattattataaaatgttgattttcttcagtatttatgattgtaaaaagatgtgaatgaatgtattcctttaatattttaatcatcagtttgagactctgcaacctatttatttgtgatgtttacactatactctgtcaagtgtctgtctttttactttagaaaagtggcttctttcagtgatattccaaaagcagaagtgagataaagattactaatgaattcaataacaaatcagaattgagttaaactcaccacggatattttacatccgttcacatacttctatggtccaccaatgaccactatatctttcaaggaaaagacctcattagaacagtttatatctggcaacttagtttgttgaactctagagatgtttactaaag

SEQ ID NO: 4705 - DNA, 600 bp, Cricetulus griseus
ccaagaagagcccgtgttggggtcaactgtgcccaccaggccagcccgccttagccccaggaagctcaggacaaatcatgtctgtcctcagggctggtgaggtagcccagacaccagccaaggcacactggccctgcgggtgctggtccttctatgtggggtggatgcctctcctggcttctgactagttgtcatttccaccattggaggtacttgcttggatggctatctgatctttttttaaaaaaaaactaaaacaaaactgacattaaaatggacaactacatttggcttttctgttgtgaaaagctggagtcaggtgggcgccaggcacatttccgactgatagagtagcggtaggcccttttcgcctgcagacgccatccccgagcaagttagtactcacctgacacacattcaggcagcatgggtgtaccagccttgattggaaccaaggcccttctagaggggaatgcctcaggggcttgcactggggagccatgtgagagttaccagagtcagctgtgaggttaagactagctgtggtgtgagcactttttccaatactttataaacagactctgttaaaaaaaaaaaaaa

SEQ ID NO: 4706 - DNA, 600 bp, Cricetulus griseus
gctgccgaggccgggccgggtggctccggggtcccgggctgggggccgggcgagcgggcgagcgggcgggcgggcggagcgagagcaccgggcaccgacgcgtcgccttcgccgccaggctcaacgtggacgggctgctggtctatttcccgtacgactacatctacccggagcagttctcctacatgctggagctcaagcgcacgctggacgccaaggtgggtgccggggtcgccgacggctcgacggctcgacggctgcctgcgctcgccgccttgcacgccctccccgcctccctcaggctaacttcctggtctggtctggtcgggggaggggggggaacccgggcacgttggccccaggcctgcaatcgcagcagcaccctgggaagcgcaggctggagcatcgctgcaagtttggaggccagcctgggctacacagtgagaccctgtgtcagcaacagcggcacaaataagtagcagggctgggaatgtggctcacccggtagctagggtgcttgctagcatcatggatctgatgctccccctttcatcctcgccaccgcgtaaactgaacgtgacggtgtgtgtctgcaagctt

SEQ ID NO: 4707 - DNA, 600 bp, Cricetulus griseus
atctcccagtcccagagtacagtctttaattgcagggaggacagcaggatcccgatccacaggtgccacccacccttcccagttcctgagcggctgtggccactgcagccagtccacttatcgagggctcaagtcctgggtgctggcgctcatggtccgcaaggcctcactcaatttccgggttgagaactgggggcaggtacaggaacggtcagagttcttttccagttgacactgggatcgtgtcgtgcctctgccctccacccccgactggaccccatcatgagtgccggggaggaagccccacctttcctgtcgagcctgtcagcagcaccctactccaccaccggcccctcacctgcggcctggcagccctcgggccttccacattcagcatgttgagtgacacggctctcttcatccttcagaggccgagaggacagagtgagtcaggaaggcctgcagggccctggctctgaccagtgtcgcagacgggctgctgagctcacccagcactcaccctgcagcgcccgccatgctctcccctcggaggcgcgagaccagcttctcactcccccgccggatggactctcgaagctt

SEQ ID NO: 4708 - DNA, 1400 bp, Cricetulus griseus
tcatgcagagcatcatgcagaacctcctgtctaaggatgtactgtacccgtccctgaaggagatcacggaaaagtatccagagtggctgcagagtcaccaggagtctatccctccagaacagtttgagaagtaccaggagcagcacagcgtcatgggcaaaatatgtgagcagtttgaggcagagacgcccacagacagcgaggctactcacagggctcgttttgaggcggtgctagatctcatgcagcagttacaggacttggggcatcctccaaaagagctggccggggagatgcctcctggcctcaactttgacctggataccctcaatctatcgggcccaccaggtgccaatggcgagcagtgtctgatcatgtgaaacacaacacgttttcctccctgagtcccagacctggggaacatctggagtcagcagaactattgggaactgaggcaggaatgtcgtctctgggagctggctgccccacactctccatcccattcaagactgtgccctgccagctgcggatctgctgaatctgctctgtaggccatttctgtgagccttactccatcatgtgttctgctgttagaaacaggccagctcattgccccgtaaaggaagacatcacttcttcccactcccaaaaataatggtctatatggctgtactcatgttcccctttattcccagggacttcgtgccttgtttctactccctctcttggatctggggagcaggagctgagtcctaagactttgtgtttgtttctattaggcagggcttctgggaatgaggagaaaatgtagcttaccctggggctgtaggtttgtcaccacatctccttgccttcatttcgagctctctgaagggaaaggaatttgcacttaacctgtggtcaggttggaagagaagccctgggcttttcctgtccctaggtgctgcccacttaattcccctttcttcctgagaactcaagttgctacctaccttggttctttcaacagctctggtttgggtgaacccagctcttgaccttccttggccccttgactgtcctcttacctcctctcgttttagattcttattttactccagcccctctgaaccactgtgactgatgaaggccaatcttgttccctttcatctactcctgtgtcattctcttcccttcccttccctagacccttcccttccctggccaacacgtaattgtagtgtcagagctggtaaatgagtggccatgctacccagatacattctggcttacttgagacatcagattccctagaatccttggttcaggaagatgcttgggaatggggtgcagcctgagtcttttttcctgcaagccccaggggacagtatctaataaatactctgagcgcaaaaaaaaaa

SEQ ID NO: 4709 - DNA, 600 bp, Cricetulus griseus
ccttctgcttcctcagccatgaccatgggagcacatgggagctgggccactttgtgtcccagaactcgctggagtgccaggtggctgaggttggcactggcgctgagagggtggtctatctcaatgctaggagctgcctgggagccagggtccaggcacaaagtcctaacagtggcctggatttccaggacaaccaggtagtgagtaaacttgtagagcctcccaaaggctgccatggaagtgtgattgctttccccaaccccacctcaaaggcagatgccttagatgtgtggctgctctatacccaccctacagactcccggaagaggaccaacctgggtgtgtacctcaatcagaagccactggaccccaccacctggtcagctcccaccctgttggcaacaggcatctgtgcctactcggacttgcagaacatggggcacggccctgatggctccccgcaatttgggtgtctgtatgagtcaaataactatgaagagattgttttcctcatgttcaccctgaagcaagctttcccagcagtgtttggtgcccagtgatcttgctgcatgcggcccaaagtgcttcaaaacccccccg

SEQ ID NO: 4710 - DNA, 600 bp, Cricetulus griseus
  misc_feature (442)..(457): n is a, c, g, or t
ctggagcctcgacccacatggcgggagcacacagaggccttgctgctggcctcctgctatctgccacctgccttcctgtcggcccctggacagcaaatgagcatgttggctgaggcagcacgcactgtagagaagcttggtgatcatcggctactgcttgactgccagcagatgcttctgcgcctgggcggtgggaccactgtcacttccagctaaaccttggatggtctccccagtattagaggcccttaaggacctttgtcactggctgtggtcgtccagagagggtgagcctgacaagcaatcaggatcatgccgacctctagtgacaaatctagaaattgcagaggctgcactggcccaatgccaccctcttgctctgtaggcacctttttcctgtcctatggaaaggaacctttcccctagctgagggccaccctgnnnnnnnnnnnnnnnncactcctggaagacttgtatatagtgtagatccagctgagccagtttcctgtgcaggctcatgtactactttaacttttgcaaactttattttcataggttgagaaattttgtacagaaaattaaaaagtgaaattatttata

SEQ ID NO: 4711 - DNA, 600 bp, Cricetulus griseus
  misc_feature (233)..(274): n is a, c, g, or t
gtaacttatgaagtacataacacaagtgtatcacttgtaatttctgaaataagattacagaagctgaagaattagatggtgtgtgcttctttacaaagaattcctgacaaataatgccattaagtgacagctaatgatgaattgtggacttagtcagatgatcataccgacagaaactacatgaagagagtacatgcctgagccaaggtgaactctagcatcacctataagannnnnnnnnnnnnnnnnnnnnnnnnnnnnnnnnnnnnnnnnncatcacctatagaactactatgagctgcagttgacattcttcagtccatcctgatatggtctctgttactgataactccaggtctttggtaatgactgtgaaccagaaaactcagaagtagcacccagatttccagcccagacaaaacataacatattaagtcactgaggtttgggaaagatttttagacatccatgggtagcttatatagttccttttaatcagttgttgaaagtagtctcaatattcatatagtagtcgtttcattgtgtgaccaaatttatagacaatgttctcacctttgttattttcgttgttgtttctgg

SEQ ID NO: 4712 - DNA, 600 bp, Cricetulus griseus
  misc_feature (117)..(154): n is a, c, g, or t
  misc_feature (509)..(536): n is a, c, g, or t
caaagctgggtatggtgtcgcacacctttagtctcagcattagggaggcaaaggcaggcgcatctcagtacaaggccaccctgatctacagagggagttccaggacagctggagatnnnnnnnnnnnnnnnnnnnnnnnnnnnnnnnnnnnnnnattttcaaaacagggtcacacactaagttgccttgaactttcttagcccaggcaggccttaaactggtaaccctcttatcccagcctttcaagtagttggaattatagacctgtgctactaggtcttgcctattcagatcctttcattcctcctgtgctcttttctcaaaaaaagatgcaaacctccttccctaggtagcactatctgattctgtttccccaggaatcctatactatgtctacatgggactgcttgcggtgttctgtaccaatgccatcaacatcctagcaggaattaatggcctagaggctggtcagtcactagtcatctctgcttctatcattgtcttcaacnnnnnnnnnnnnnnnnnnnnnnnnnnnnagagataggaagaaacagacacctgtgtgttaagaggattgcttggtgtggatttagagaattc

SEQ ID NO: 4713 - DNA, 600 bp, Mesocricetus auratus
taaacccattaccccaactgcacattggtcttgtgagaagtgactatcatttgtctgtgggtgttcacggcaaaggctagactgagagaccgtgccatcacctgctatgacagaataatcactggcttctttcccctgacccaggctaaaaaacattttatttaacaatttgtatgtaaactcttaaatgagcaaatgcaaagaaacaaaattagatgcaatgacaatttggtcctgttttatatgtacagaaagtgaacgccacaatggctaattagttgatctaaatttgctcaagagttgaaacaacagaagtgagattaacaccttttcctcatctcctatccaggattccagcaagagcagaaagaacttcgaactctgtcttgcacacccttcaccatgaccatagtaggaacctccaatagctgatgagtgggtgaatggcatggataaattaactcacttggcaatcagacaatccagaagggtaccgtgttactatgtgaattctcaaaacacttgatgaatatttcacaataacaagctgtttgattcgttattcagatatcaaaaatacaagtttcactttctagttga

SEQ ID NO: 4714 - DNA, 1000 bp, Mesocricetus auratus; identical to SEQ ID NO: 1072

SEQ ID NO: 4715 - DNA, 1400 bp, Mesocricetus auratus
aaccagcattgctttctgaaatgagggcccaaagaatattccattaagattttgactcttccagctccttcctagaggtcttgcattcccaagggatgctatggacggcttcgatcaaatgcatattcttggtccctattgaatcttttccctaaactaagtcccaagtaacagtcaccagccagggacttaccccagggcttagaggtattggtctctgggaggaaatttgaatgggtccatattgcctctccacaagtccagtccttgggtattgttttccagttgggtgggagatcaggtgtactggttacacacctttttatagactcccctttctgctggaaaattttcagatgcttctgagagatccccaaagggtgaagctatttatctgtagtaagctatttatctttgtttttgaaatatcaaaccctggaggtcctttgtgcagtatgacttttgacttttttttaggttactttgtcagaagcataacagggtataagttgattcataataaacacctgtcaatcttccatcttaacctgttgttgtgctgtgatccttcagtttctaaaccagcaaggtttgagtcttcatagcacatcaggatgactttagaacggtcctcctaaactggtgccagactacctatgcccaactcaggttcatctggctgaatctcctaaaagatcaaggaaagaagcactgttctgtacctagggctatgaaaggggtttctctcctgttctggagtctggattgtgagcaggagagctttggtcatctttgtgctatggccacccttttctcttccttaaagggaacattacgtttctatgtccttctatttcatagaaactgatcctagtagtggttttcacagaacagcatggtgcgtgcttgtgacaccttacaataaaaggagaagccaacagaaattaaagtgcacaaacaagcagtagattggcataaggagggtgtggtgcacaacccatcccactatttccatggatgtgtttgttgatattttcacaaaccagttggtcctcagagtgaggtgcctgggaatctcccagaaagcctcagggctgcccactactggaatctcatcaccagataagcaggcttatggtttagccaagggagaatggtgttaccctctaacctcatttttttaacgtagtaggtaagtgtttggtggcatttatccatctgccagaatgtcccattgctcctggatcttccctggttacttgtagaagaaattaaatctataaagtaaggctttctgtaagatgagacttccttcctaagtctcccatgatgttactgttgataaatttatatgtttaatattttttcaaataaaaaaacaagagaaaagtttatcacct

SEQ ID NO: 4716 - DNA, 600 bp, Cricetulus griseus
ctcacttctacaatgcagaccctgtgctatcagaagccgttctgggtctgaaccctgacccaagggagcattctttgttccttgacatccatccggtcactgggatccccatgaactgttctgtgaagttgcagataagcctctacatcaaagctgtcaagggcattgggcaaacagggaagatcgagcccgtggtcctcccattgctgtggtttgagcagagcggtgccatgggcggcgagcccctgaacacgttctacacgcagctggtgctgatgccccaggtacttcagtatgtgcagtatgtgctgctggggctgggcggcctcctgctgctggtgcccgtcatctaccagttgcgcagccaggagaaatgctttttattttggagtggtagtaaaaagggctcgcaggataaggaggccattcaggcctactctgagtctctgatgtcaccagctgccaagggcacggtgctgcaagaagccaagctgtagggtcccaaagacaccacgagcccccccaacctgatagcttggtcagaccagccatccagcccctacaccccgcttcttgaggactctctcagcggacagtcgc

SEQ ID NO: 4717 - DNA, 1400 bp, Cricetulus griseus
cccagggcaacccctgttctccagcctagaccccagccccagccgcagccccagccttcagctcagcttcagcaacagacggtaatgatcaccccgacattcagcactgctccacagacaaggatcatccagcagcctttgatataccagaacgcagcaaccagcttccaagtcctgcaggctcaagtccaaagcctggtgacatcctcgcaggtacagccagtcacgatccagcagcaggtgcaaactgtacaggctcagcgggtgttgacacaaacagccaatggcacgctgcagacccttgccccagcaacagtgcagacagttgctgcaccccaggtgcagcaggtcccggtcctggttcagcctcagatcattaagacagattcccttgttttgaccacactgaaaacagatggcagccctgttatggctgcagtccagaacccagccctcactgccctcaccacccccctccagacgggcgcccttcaagtaccaactctggtgggcagcaatgggaccattctgaccacaatgcctgtgatgatgggacaagagaaagttcctattaagcaagtacctggcggtgtaaagcagctagagccccccaaagaaggagagaggaggacaacacacaacatcattgaaaagcgatatcgatcctctatcaatgacaaaatcatagagttgaaggacttggtcatgggaacagatgccaagatgcacaaatctggcgttctgaggaaggccattgattacatcaaatatttgcagcaggtcaatcacaagcttcgtcaggagaacatggtactgaagctggcaaatcagaaaaacaagctcctgaagggcattgatttaggcagtctggtggacagtgatgtggacttgaagattgaagactttaatcagaatgtccttctgatgtctcccccggcctctgactcggggtcccaagcaggcttctctccctattctattgactctgagccaggaagtcctctgctggatgatgcaaagatgatgaaggttctgcaagtaaaaagcccaaggtagagttatcagaagaagagctgaaggcccattttgccaagggcacactgggcaagctaactgtgcctacactaaaggaggtctgtaaggcctatgggcttaagagtggaccgaagaagcaggaactgctagatgctctcaccagacacttccagaagaactgactgaaggtcacaccccagctacttcccacactgcagccagaccacctacttatgttctcaccaagttagcaggtgtttcttagctacaaagagttgcctgacagaaatgcaaaggacttgcttcatggagactgtagccctcccactttgttgtgccttatatgaataaacagctctaatgtt

SEQ ID NO: 4718 - DNA, 600 bp, Cricetulus griseus
  misc_feature (35)..(89): n is a, c, g, or t
aggttcagagggccaggttgaagtgggtggggctnnnnnnnnnnnnnnnnnnnnnnnnnnnnnnnnnnnnnnnnnnnnnnnnnnnnnnntgcgtgctgacacatggggacaaaaccactccttataaatgttcttgttcaggttttgtgatacatgcctggcctgtagttccaggagaggcaagaggattgctttaagtctgacagcctggtttacaaagctagttcaaagtcagctaagaccacatagtgtgcacaccacagcagcttgatccctcacactggcctcttgggtcagtacttgacaatgttgtatcttcaggtcagaggccttccagctgctgctttactcttcagcatgcggtgtccccttgggactgtctccatacatggcacaatcaggcagtgtcttacaggcaaggaaactgaggctgaaaacagagagaaggggcagccatcacacctcaggggtacagtagggctaattgagatctccaacctctagacccagcagggacttagcctccccatctcctgtctctgcaggccttggcagaccttctgctcgtcagtggggtagcaacagccacaaccctagcct

SEQ ID NO: 4719 - DNA, 600 bp, Cricetinae
tattaatgaagcattcaaagagcttggccgaatgtgtcagcttcatttgaagagtgaaaaacctcagacaaaactcctcattcttcatcaggccgtggcagtcatccttagtctagaacagcaagtcagagagaggaacctcaaccccaaagcagcctgccttaagagaagagaagaagaaaaggtctctgctgcgtcagcagagccaccaaccacgctgcccggaaccatcctgggcttagcgaaactaccaacctatgggtcatctgtaaacatcagccagttccagtgtcagcagtaggctagatagaagatgacctctcctcataaagacttggacaactcagattatctgaagacacaaaccaacctgacaggaaggagaagaaaaacaaaacacttgaagcaagaaactcaaatataatcctatgatcaaagcaactggtcaacacttccatcagaagtgaggataggaagctcatgagagaacgccggcccatgaggtgtttacagcatatcattctgctgtaagcaatgtgtcgcttctgcataatcagagactgtctcatctctcactcaacgtggaagttgccggaattc

SEQ ID NO: 4720 - DNA, 600 bp, Mesocricetus auratus
gatggttctcctctcgccttgctgggaggccaccaagggggcatcacccacctttgctttcaccccgatggcaacctcttcttctcaggagcccggaaggatgccgaacttctgtgctgggatctccggcagcctggccacctcctgtggtctttgagtcgggaagtgaccaccaatcagcgcatctactttgatctggacccgagtgggcagttcctagtgagtggcaacaccaacggaatggtctctgtgtgggacatcagtggcgctttcggtgacagcagcaagctgggacctgtgatgacttttctgccccagaaggactgcaccaatggagtgagccttcaccctagcttgcctctactggctactgcttccggccagcgcatgtttccagagcccaccaacagtggagatgaaggcgagccagagggggatcttcccctgctctccctatgccacgcccatcctgaatggcagcttcagctctggtggtgtggagggggaccagaccccagtagccctaatgacccccaagatgagaagggacaaggaagggcagagggctgtggggatgggttaatataaagattttgtata

SEQ ID NO: 4721 - DNA, 600 bp, Mesocricetus auratus
gtctccctcatccactggaccgggctcttcagacacaccttccacgtcttctcctgacgccaactcaggctgattcgtgtcttctacaggaaggctcacattttcagacagttcttgctcctcgattcgaggactcaactcaccgggagtattaaactctacttccagcggagcggagagaggaagtgggtgcccttgttgcggctcctggaacacaaccgagccagccacagaatctgcggctacctgggatcggtcatctccaccgcaaggctgtggcaccggttcagagtctgtattttcatccacaggggaaccttggggcactggagctggggcctggtcagaagagaggctgtccgggactacgagtcgctcctccgacgtcttcattctgtagagcaacagcggccgggcaagcctcgttgcaccggctaccagctgctgaggctacactgcattaaagtccccaggaattcgggtgcagaactgcagagccccgccgcgcctgccttcttcttccgggaagagttagccgaaccccgcaaccgagggcaaacaccgggaaaccaattcagggagaaaagcacctggggtcgc

SEQ ID NO: 4722 - DNA, 600 bp, Cricetulus griseus
gtggatgaaatgtgtaactgaagttgtcttcacctctggcccctccaggtagcagagcgcctccagctagtgacagttcaccgaggcgagagtgaggatggtgccttcactgaatgtaacaacatgaccctcatcaacttgctactcaaaatctttgggcccatacatgagagaaacctcacactgctcctgctgcttttgcaggtaacactgagggtggggtaaattatgtaagtgttcttatctcaagttcaccttggttcttattccagtccatttctccttctagatcctgagcagcgctgtcaccttctccattcgataccagcttgtccgactcttctatgatgtctgagttccctgaagactgactgcccatagcctccgttggacctcacccaggaccaacctgtctggtccaagactgccttctggtccaggcctctccaactgttggttttttcagttttgttttcagcttctcccatcacctgtaatgattattggcctggaccttattggactttaaagtccattagttgcactttgcccctggctttcttcagcttgctactcttcccctttctgtcccatctgcag

SEQ ID NO: 4723 - DNA, 973 bp, Cricetulus migratorius; identical to SEQ ID NO: 1081

SEQ ID NO: 4724 - DNA, 1400 bp, Cricetulus migratorius
ctggcttctggattcgccttcagtgactatttcatgagctggttccgccaggctccagggaagggactggaatgggttgctggcatagacactaaaagttatgattatgcaacctattactctggttcggtgaaaggcagattcaccatctccagagatgattcccaaagcatggtctacctgcaaatgaacaacctgagaactgaggacacagccacttactactgtacaagagaaatcggatactggggccaaggaaccatggtcgccgtctcctcagccacaacaacagccccatctgtctatcccttggcccctgcctgtgacagcacaaccagcaccacggacacggtgaccctgggatgcctggtcaagggctatttccctgagccggtgaccgtaagctggaactctggagccctgaccagcggcgtgcacaccttcccatctgtcctgcattctgggctctactccctcagcagctcagtgactgtaccttccagcacctggcccaagcagcccatcacctgcaacgtagcccacccggccagcagcaccaaggtggacaagaaaatcgagcccagaactgatacggatacatgtcctaatccaccggatccatgtcccacgtgtccaactcctgacctcttgggtggaccatctgtcttcatcttccccccaaagcccaaggatgtgctcatgatctccctgacccccaagatcacatgtgtggtggtggacgtgagcgaggaggagccagacgtccagttcaactggtatgtgaacaacgtagaagacaagacagctcagacagagacccggcagcggcagtacaacagcacctaccgcgtggtcagcgtcctccccatcaagcaccaggactggatgagtggcaaggtgttcaaatgcaaggtcaacaacaatgccctccctagccccattgagaaaaccatctccaaacccagagggcaagtccgggtaccacagatatatacctttcctccgcctatagaacagacagtcaagaaagatgtcagtgtgacctgcctggtcacaggcttcctccctcaggacatccacgtggaatgggagagcaatgggcagccacagccagagcagaactacaagaacacccagcctgtcttggactccgatggctcttacttcctgtacagcaagctcaatgtgcccaagagcaggtgggaccagggagattccttcacctgctccgtgatacatgaggctctgcacaaccaccacatgacgaagaccatctcccggtctctgggtaattgagctcagcacccagaaagctcttaggtcctaagctaccctggcaccctcctccacccttcccttgtataaataaagcacccagcactgccctgaaaaaaaaaaaa

SEQ ID NO: 4725 - DNA, 495 bp, Cricetulus migratorius; identical to SEQ ID NO: 1083

SEQ ID NO: 4726 - DNA, 579 bp, Cricetulus griseus
  misc_feature (99)..(114): n is a, c, g, or t
ccccccaacttgatgtatgaaggcttttggtctccctgggagtgggttgaggtgttgaggcagccagggcttgcctgtacactgacttgagaccagttnnnnnnnnnnnnnnnnttacaaacagtgctgcttgtttgtggctttgctagattctgggtagcagcgggggagggggtcactattacctttgctccaagaggttctagggtggtctgggccttgcctagtagtttttagtgggaggacacaagcatcatgacctttaaccagttatcacaaataccctgtccattgagttctgaagtcttaattgtgtcttggttggaagggtgtccatcctgaattgggaataccccctgggccaagttgggttcctgcagcaaacaaccctgtaatctcaaccttcctctacctttgtgggaagcaggaatcctgttgggagggtagctttactgcctttgagttctgcaagacagtgggaagtaaaagcagtctcggttctcttgctttaccagatacatgatcacaaagtttaagggtgttaaggctccccaggcatgggtatctttccccggtacc

SEQ ID NO: 4727 - DNA, 600 bp, Cricetulus griseus
ctgccagtgtgcgaggaaggcttctcactgcaccagaaaagctgtgtccagcactgcccaccaggcttcacaccccaagtcctcgatacacactacagcactgagaatgatgtggagatcatccgcgccagcgtctgcactccctgtcatgcctcatgtgccacctgccagggcccagctcccacagactgcctcagctgccccagccatgcctccctggaccctgtggagcaaacctgctcccgacaaagccagagcagccgagagtctcggcctcagcagcagcctcctgcactgcatccagaggtggaggtggagccccggctgcaggctggactgctgccctctcatctgcctgaggtggtggccggcctcagctgcgttttcattgtgctggtctttggcactgtcttcctggtcttgcagctgcgctcaggctttagcttccggggagtgaaggtgtacaccatggaccgtggcctcgtttcctacaaggggctgccccctgaagcctggcaagaggagtgcccatctgactcagaagaggatgagggccggggcgagaggaccgcctttatcaaagaccagagcgccctttga

SEQ ID NO: 4728 - DNA, 600 bp, Cricetulus griseus
tgtgtggtgtgcgaggaaggcttctcactgcaccagaaaagctgtgtccagcactgcccaccaggcttcacaccccaagtcctcgatacacactacagcactgagaatgatgtggagatcatccgcgccagcgtctgcactccctgtcatgcctcatgtgccacctgccagggcccagctcccacagactgcctcagctgccccagccatgcctccctggaccctgtggagcaaacctgctcccgacaaagccagagcagccgagagtctcggcctcagcagcagcctcctgcactgcatccagaggtggaggtggagccccggctgcaggctggactgctgccctctcatctgcctgaggtggtggccggcctcagctgcgttttcattgtgctggtctttggcactgtcttcctggtcttgcagctgcgctcaggctttagcttccggggagtgaaggtgtacaccatggaccgtggcctcgtttcctacaaggggctgccccctgaagcctggcaagaggagtgcccatctgactcagaagaggatgagggccggggcgagaggaccgcctttatcaaagaccagagcgccctttga

SEQ ID NO: 4729 - DNA, 600 bp, Cricetulus griseus
  misc_feature (208)..(227): n is a, c, g, or t
gcctggcaggcgggagttcggggtcttggacaccaaagctgagctgctggacatatctgtgctccagcccagatgcgagcacctgccaaggcaggagaactccgggcagctgctggagacagctggagaagtcccagggccttcagcaatgctttgccagcctgagacaggccaggggttgaggtctgcctcactgctattgcctctnnnnnnnnnnnnnnnnnnnnccccattagtccctgggctcagggcactgggtgggaggggagctgtccggtgctaccacaccatgccatcagtgggctagaccacagcagcagccagggacgggtcctggaagctcttggccagagagtgcctctccccctgcctcccaaccaggtctttggtggggggatcccaaagccattctggaagggctccagaggaaggtccagcctaggctcccacaaaattagcagcccccctcctgcacctctaggttgtctaaagaagcacagtgtaacttagggcaggctcctgaacctgcctcttcctgctttccacctccctaaatccctttctctggcccagtctttggcccttggttttctttctaga

SEQ ID NO: 4730 - DNA, 600 bp, Mesocricetus auratus
  misc_feature (136)..(196): n is a, c, g, or t
  misc_feature (199)..(213): n is a, c, g, or t
gggaagtggatgccttagagggtagccaggcagcatgattctcctggcagtgcttttcctctgcttcttctcctcgtactctgcctctgttaaaggtaagtgtatgttgcgttttcttaaacgtggatctctctcnnnnnnnnnnnnnnnnnnnnnnnnnnnnnnnnnnnnnnnnnnnnnnnnnnnnnnnnnnnnnttnnnnnnnnnnnnnnnagagttcctaactatacaatttttgaaagtgtatatggttggaatatttgggggtaagtgactaagtggaaatgaaaaaaattaatttctgactctgttttacgagagtggaggtccctttttgcttcacgccatccctgagaccagtgtgtttctagcttcgacttgttattcctggaaaaagatttgagctattgttacctgctgctgacagacacacagaatgcaatgccttcatttgaattgtaaaatgggattttaaaaacccagtcccgaaaattccttccagttgcttagcaatgggacagcaaaaagaatcgaatccaactgggaaaaaaaggcatttgattgccaaagaattatgaatgaaatgttagagcatgtatg

SEQ ID NO: 4731 - DNA, 600 bp, Mesocricetus auratus
ctcattccccgcccccttccgtcgctctctttggctctgatcccggtttgtttacgtttaattttggcatttccagaaagcaaatcctcgaggtgtaaaatgcctacctgccctctctcggatgttcaggtggacaagcagacagggatttggttgcggtacaagtacctttcacttgtggcccaagcctggcctctctcctctcccttcaccccccccaggagagacttagacgcttacccccacccctgcactgtccaatgcaagtcactcaaaagagctgtcaaagggtttttacccagtgtcacaaaggtcacctgttcaccatggccataggtcacacagaacatgtcccttcagctttattgagcctggtccatctcacctagcacagggcaggcgcttgcccgcacagacgctgagggcgcaggacccagctgagctaaggttagaccactgtacatagatctgccccgtggaattactctcctttggcactcagtaatagaacatgacatgcagtggggcggagctcctggcaatgtacatagatgcatcattcctgtagctttagacgtgcaactttagagacaagaagca

SEQ ID NO: 4732 - DNA, 1400 bp, Cricetulus griseus
  misc_feature (408)..(470): n is a, c, g, or t
ataagagctaagcagggggaaggctctcattggtgtagcccgtcgtccactgcattccccaaagtgaatattcaagtgtctaggcagtggcacattttcacactacaaataccattgtggaattggagacaaacaacagatttagatgcctacatatcatgaccagaagcactttagtataaagggcacagtgtagatatttttaccaatttcattttttagtactcaactgttgaaatcaaatatttagtctttcaaattctttaatgctttttctccctctggtagatatgggaacttattgctctgcattttttaattattgaggtataatacagcaacctctggcccagtgagatggctcactgagtaatggtgcttgctacacaaacctgaccacctgagttnnnnnnnnnnnnnnnnnnnnnnnnnnnnnnnnnnnnnnnnnnnnnnnnnnnnnnnnnnnnnnnagtgccctgtagcacacatgcccatcaataataataataaacaattaaaaaaataagtcaccctttcgagatacctttgagaacaaagaactggcctgtatgctttggtgcttggagagacccactatagcatttgccagagtgtcattctgaactctaggtgattgcttccctagagttcccctgtttgtgctctcacactttacagaaagctgcactgtctttacaagaccttctggatcagggttcaccgtgctttgggtaaaacaacaatggagactccaaaggagggaaaacaagagggactgccagagctcagatctccacggccaccctgaagcaaatcttgtcaatacctatcagctctgaaatgtattgacttttgtggcagatagtatctccggtttggatggtgtcctagcttgattcactgagtgtgtaataaaaccctgggcagaagtaaggaagaagttcatttccacttacaggtcacagccggttgtcaagggaagtgaggcaggaacatggctccctggctccatttccatgtcttactcagcttgcttttcttatacaaccagggccgcctgccaaggggtggctctgctcacaacagtaacaacaaaaagcacttcagacaatgcccacagactaatctgttagagacagtccctcaattgagatccccaggcaattatatttgtcaaattggcaaaacccagcacaggcggttttctctagcattaagactttagaacatttgagcacatttgttgtaagtgactgatatcccaaatcatgtatggctgagggtgtttttgcatttgtagagatttagctctattttagagatgtaaaataatgtttccttatagtcttgtttagcctaaaacatttttattcaataaagcttttaatttacatttcaac

SEQ ID NO: 4733 - DNA, 600 bp, Cricetulus griseus
tgaaaagcgatatcgatcctctatcaatgacaaaatcatagagttgaaggacttggtcatgggaacagatgccaagatgcacaaatctggcgttctgaggaaggccattgattacatcaaatatttgcagcaggtcaatcacaagcttcgtcaggagaacatggtactgaagctggcaaatcagaaaaacaagctcctgaagggcattgatttaggcagtctggtggacagtgatgtggacttgaagattgaagactttaatcagaatgtccttctgatgtctcccccggcctctgactcggggtcccaagcaggcttctctccctattctattgactctgagccaggaagtcctctgctggatgatgcaaaggtatgagcttttgacatttctcaccctcagaatctcttgttttccctaaggcattagtggccaggtgactggatcactgcttaaaacaatgtggggtggagaggaccaggaattctgttatgttagctgcatttaaagtggtgaaaactggtggtgcatgcctgaaatcccagtgggagggaggatgaggcaggaagatcttgagatggtaccaagaccatctccaa

SEQ ID NO: 4734 - DNA, 1400 bp, Cricetinae
  misc_feature (739)..(758): n is a, c, g, or t
ccccatagacaatattatgtctttcgatagccattcacatcatgagcgagtcatgagtgcccagctcaatgccatctttcacgattagaggcacgtcagtttcaccattcccgggaaacgaacccactgtgctttcagtgactgtcgtgtttacagaaggcagcctttttgctacgatttctgcaaagtgcaaatactcaaagcttcaagtgatatatgtatttattgtcgttactgcctttggaagaaacaggggatcaaagctcctgtttaccttatgtattgttttctatagctcttctattttaaaaataataacagtaaagtaaaaaagaaaatgtgtaccacgaatttcgtgtagctgtactcagatcatattaattatctgatcgggataaaaaaatcacaagcaataattaggatctatgcaatttttaaactagtaatgggccaattaaaatatatataaatatatatttttcaaccagcattttactacttgttacctttcccatgctgaattattttgttgtgattttgtacagaatttttaatgactttttataacgtggatttcctattttaaaaccatgcagcttcatcaatttttatacatatcagaaaagtagaattatatctaatttatacaagataatttaactaatttaaaccagcagaaaagtgcttagaaagttattgcgttgccttagcacttctttcttctctaattgtaaacagnnnnnnnnnnnnnnnnnnnnttgcacaatttgagcaatccatttcactttgaagttgttccctctccttaaaatagaaaccagattcatagtattcaagaggatgaaaaagagatgcatttcttatcaaaacatatcaattcattacttgcacaagcttgtatatacatattataaacaaatgccaacatacacacacactcctttaaatcaaaagctgcttgactatcacacacaatttgcactctttcatttttagtcttttctttgaattccatgattttatggagtgtctgacactgttgatgtttccagaaaatataaatgcatgattttatacatagtcaaacaaatggtggcttgtcatctattcatgtaataaatctgagcctaaaattattcaggttgttaaagttgggattgatacctacgtagtcagttagtacagtagcttaagtaaaattcaaaccattgaatccataattagaacaatagctattgcatgtaaaaatgcagtccagaacaagtgctgcctaggatgtgatgctggtaccactggaaatgacctgtactgtaatcttgtttgtaaccctgtgtattatggtgtaacgcacaatttagaaaacgctcatgcagttgcaataaaaatagtattgaaaatca

SEQ ID NO: 4735 - DNA, 1400 bp, Cricetulus griseus
agaatgagcagccaactggaacctgcgctgcatgcatcactggtgacaacaggtctcttgttgctaaccttgctgctgccaactgttacaaaaaggaaaagcatcttgatttggagaataactgggtgctggtagagaaggccagagtatactacatagccggcttttttcttactgtctccccagagtcagtattgaaagttgctcgctatgctgctgagaacaacaggatcttcactttgaacttgtctgcaccgtttattagccagttcttcaaggaatccttgatggaagtcatgccttatgttgacatcctctttggaaatgagacggaagctgccacttttgctcgagagcaaggctttgagactaaagacattaaagagatagccaaaaaggcacaggctcttgcaaaggtgaactcgaagaggccgaggaccgtggtcttcacacaagggagagacgacactgtagtggctacagaaaatgaagtcatggcttttgctgtcttggatcaaaaccagaaagaaatcattgacaccaatggagctggagatgcatttgttggagggtttctctctcaactggtctataacaagcctctgactgaatgcatccgagccggccactatgcagcaagtgtcattattaggcgaactggctgtacctttcctgagaagccagacttccactgatggaagaaagaaaactcaagctgggaggtgcaggctgcagtgacctcgtcctaagtgttcctgccataagaaagaataattgtactgctatttttgccaaccatgattctcattaatttagagggctcagtattgctcctagaacctttagtctttgaaatctgggggaaaatgtttatttccataatttgttagtgcctcttaaatgtcaaaaaggaatatagcatttcagtagaaacttttatttcattttccattgtttgtaaattcatctgtatttagtaaattaattggtttttttacatttctgctttaaatacaggtgcaatttaatataatagactttttaaagaaattaatgctaacatcattcttgagctttttatataaatatatttaatttggaggtatgtatatgcacacatgtcatatatatacatatatatctgataactggtcagataaggtacagaaatgtttatcacaccaaaggtggccacataagctcttcattgtgcttcagacatatgatggacttggaacaaccgattcccccaacatttgcatcatgttattcaaatcataacctatgcttactgatggtactctgtaatttgatacaaataaattaccatataggaatcctttctgtcttggcttatgctcaataaaactaagaagaaattgtaaaaaaaaacctcgagg

SEQ ID NO: 4736 - DNA, 952 bp, Mesocricetus auratus; identical to SEQ ID NO: 1094
  misc_feature (51)..(67): n is a, c, g, or t

SEQ ID NO: 4737 - DNA, 1290 bp, Cricetulus griseus; identical to SEQ ID NO: 1095

SEQ ID NO: 4738 - DNA, 431 bp, Cricetinae gen. sp.; identical to SEQ ID NO: 1096

SEQ ID NO: 4739 - DNA, 600 bp, Cricetulus griseus; identical to SEQ ID NO: 1097

SEQ ID NO: 4740 - DNA, 487 bp, Mesocricetus auratus
  misc_feature (298)..(376): n is a, c, g, or t
tgactccatcgacactgctgtctgatcgaggatctaggaaacatcctacttcttctcaaatccctaaaagaacttctcagtctgccctaaattctctacaacatccatcatctgtcccaggatttctgaatccttcccaatctgaacagagcactccagcacctttgttatctcctccaggtactggaatacatggaccatctgcctcagtttctcagaaaatgttcccaggttctgcaacctcagggtatcctgaacctttgccatatgttggtgggcctctgaaactttccctgtnnnnnnnnnnnnnnnnnnnnnnnnnnnnnnnnnnnnnnnnnnnnnnnnnnnnnnnnnnnnnnnnnnnnnnnnnnnnnnnatcatctcaacctgcccaaaggaatcttggtcatttgtcatatgtgagagagcctgtgagaaattctccatctgtcccagttcatagagcgattcaccattgaacaaatcc

SEQ ID NO: 4741 - DNA, 766 bp, Mesocricetus auratus; identical to SEQ ID NO: 1099

SEQ ID NO: 4742 - DNA, 1400 bp, Cricetinae
aactctgctgcttaccactccaagggcaaggagctgctagcccagaagctgcccgtgtggcagcaagcctgtgctgaccccaacaagattccagaccgcgctgtccagctgatgcagcagatagccagcagcaacggctccatccttcctagtaccctgtcagcctccaagtccaacctggtcatctcagaccccattcctggagccaaacccttgccagtgccacctgagctggcaccatttgtggggcggatgtctgctcaggagaatgtacctgtcatgaatggcgtcgcaggcccggacagcgaggactacaacccctgggctgaccgcaaggctgcccagcccaaatccctgtctcctccgcagtctcaaagcaagctgagcgactcgtactccaacacacttcccgtgcgcaagagcgtgaccccgaagaacagctatgccaccactgagaacaagacactgccacgttcaagctccatggcagctggcctagaacgtaacggccgcatgcgggtcaaagccattttctcccacgcggctggtgacaacagcactctgctgagcttcaaggagggcgacctcatcaccctgctagtgcctgaggcccgtgacggctggcactatggcgagagtgagaaaaccaaaatgcggggctggtttcctttctcctacactcgggtcctggacagtgacggaagtgacaggttgcacatgagcctgcagcagggcaagagcagcagcacgggcaaccttctggacaaggacgacctggccgtcccccctcctgactacggcacgtcctcccgggccttccccacccagacggccgggactttcaagcagagaccctacagtgtggccgttcctgccttctctcagggtctggatgactacggggcacggtctgtgagcagtgctgatgtcgaagtggccagattttgagctgcccctgactagagttagaatcccttcgctgatgtccatctgaaaccaacagtgaccaatgacagatcagcccctctgctcagctgacagctcatctgtgtcgcctgtgttcccactcacgcaaccgagggtagctgcgatgtgttcctgtctggagaagacagcctggctccactccctaacattgtctcacaccagcccagcctgggctggatcccaggtatccctggggaggtggctgcctcaagaagtcaatgcctgctggccatgggtgtgccccaacagagggggcaggcatctccagtcccgactgtggaaccttgaacacagaagaggacattctgtcagcttgtagttggaagggagcctattcccatgctgattttttttttatttttaattttttttagctcatatgtgtcagatcaataaacatgtgcctacctgta

SEQ ID NO: 4743 - DNA, 600 bp, Mesocricetus auratus
  misc_feature (86)..(109): n is a, c, g, or t
  misc_feature (451)..(467): n is a, c, g, or t
  misc_feature (469)..(497): n is a, c, g, or t
aacataggacatacttggatgtggagcctataactggattcactttacaatttgcaaaacgacttcaggtgaacatcctggtcaannnnnnnnnnnnnnnnnnnnnnnnaaagaatctgaagagaaattatattgtacctatactttggcttaatgagactggaactattggcgatgagaaagcagaaatgttcagaaatcaagtgactggaaaagtaaagcttcttggtctggtagaaatggtcttgcttgggcttggagtcgtgatgtttgttgcttttatgatttcatactgtgcttgcagatccaagaatagaaaataagtagcaaacacgactacatttacgcactggctacatgaagatttttgataaaaccaatctaaaaatgaagacttaatatatgctttgtttttacaaaacacacctatatttagttgaagaaatggtgnnnnnnnnnnnnnnnnngnnnnnnnnnnnnnnnnnnnnnnnnnnnnncatatatctcttatatatataatatatatatatgcactaagccaaagcatatttcaaaatgattaatttgacactgtagcctatattttataaaatccagtac

SEQ ID NO: 4744 - DNA, 225 bp, Cricetus cricetus; identical to SEQ ID NO: 1102

SEQ ID NO: 4745 - DNA, 146 bp, Cricetus cricetus; identical to SEQ ID NO: 1103

SEQ ID NO: 4746 - DNA, 286 bp, Mesocricetus auratus; identical to SEQ ID NO: 1104

SEQ ID NO: 4747 - DNA, 1373 bp, Mesocricetus auratus
  misc_feature (72)..(102): n is a, c, g, or t
cagtgacttccatgtccatcagacgatcacacaccttctgtgcacacatctggtgtctgaggtgtttggtannnnnnnnnnnnnnnnnnnnnnnnnnnnnnnccccattttcaagctgctggtagcccatgtgaggtttaccatagccatcaacactaaggcccgggaacagcttatctgcgagtatggcctttttgacaaggccaacgccaccgggggtggtgggcatgtgcagatggtgcagagggctgtccaggacctgacttattcctccctgtgcttcccggaggccatcaaggcccggggcatggacagcaccgaggacatcccctactacttctatcgagatgatgggctgctggtgtgggaagccatccagtcgttcacaagtgaggtggtaagcatctactacgaagatgaccaggtagtgatggaggaccaggaactacaggacttcgtgaaggatgtttacgtgtacggcatgcgtggcagaaaagcctcaggcttccccaagtccatcaagagcagggagaagttgtctgagtacctgactgtggtgatcttcacagcctcggcccagcacgcagctgtaaacttcggccagtatgactggtgctcctggatccccaatgctcctccaactatgcgggctccacccgccacggccaagggtgtggtgaccatcgagcagatcgtggctactctaccagaccgaggccgctcatgttggcatctaggcgcagtgtgggcattgagccagttccaagaaaatgagctgtttctgggcatgtaccccgaggaacatttcattgagaagccagtgaaggaagccatgacccgattccgcaagaacctggaggccatcgtcaatgtgatcgctgagcgcaataagaacaaaaagctcccctactactacctgtcaccagacaggattcccaacagtgtagccatctaagcctgccttcctggcccagcatctctctgggaaggccagtggttttggcagccagactcctggcaggctctagatgcaggtgatgtgtcttctttccatgctagctagcagtgctacccctgggcctggctattctagtttggggggacatgctcctgcttcttccggtctttggtggaagtatgtacacagtacagggacctccacctggatcccggctctgcagctgtgacccccagcccagctcagcacttccacactaagtagcaacagtccatcagagtaagtgacatctgtcctggttgggtcagggttaccttattctatttatgctttgtccaactgctttcatgtagtaggtgcctaaaaaaaaactcttgaatgaagattttgttatgaaataaaattcatttaaaac

SEQ ID NO: 4748 - DNA, 1400 bp, Cricetulus griseus
gaacattatggtatgggcttctctctttctgggccatggagtcattctgtgcttttattctcaagaatggtatgcccgccagcactgtcctctgaaaaatcccacctttctggattatgtccggccacgttcctggacttgtcagtacgtgttttagaagcctgggctctgcctactttcttgccgatgaggaatggatgttcttcctgattctggccagccgtcttcagcagttactgaatatatctaagccacattgtttggaccactccagcctctccaaatggctcacctgaagctgggctcggctcactaagttattatttttggtttgtttcctttgggagagaaaggagaccaattgctgaggtaaatggcgattttgggggggttatctcagctcaagctttggtagttttatctgtttgtttccttaattctgtccaaggagagactaagcatatcttgaccatgaattagccaaaacacttaggaagaaatcatttcagtacctgtgtcttagaagtttttcgtgcacactgttaggtgagctagctaactgtggcaactggggagaaataaattttgttatttctagtagaaagagagaaaatacctatttcccaaagataatcttgttatgctttctgctcatatctcttgttgctattttgttttgctttgtttctgtgctgggaatggaatccagggccttgcccagtggcagcacactgagccacacaccagtcccatgttgtatttttctgaaagttctggactattcttttttctttcttgtaacttttctgtttgttgtgatttttttaaaaataattagctttctttcaccttgaactcaatactagtacaaattcaagggtcaaaagtatgaaggggaaaatacattcccttttgaaacttcaaaagtcatttaaaacatatttgctgagttagtcataggttttaattatgctagcaaaaattctgtagaagattttattgtcactggtttgggttttttagacgtagggtcttgctatgtagctcaggctggacttgaacttgttatgtagcctggctagccttgaacccctgactgacctcctgcccatgcctcccaagtgctaggatcacagaagataccaccgtgcctggccaagattttcctttcttttagcttttaagttaattagaagtattctttggtacagttgctttattgtctaacaagtagtgactttccttgttatagactagagtccataatggaagtactaatctctctattactactaagcggctactaaggatccagaagctggcttctgaagcatccgctccatcattatactttaacagtatatttttagatgaaataaaatactatgtgatcatttgta

SEQ ID NO: 4749 - DNA, 582 bp, Mesocricetus auratus
  misc_feature (401)..(415): n is a, c, g, or t
gattccagttcttaacaaacaaatatagttgagatactcgttgcctctcctggaaaaggtggctgttttgtagagtggttgttttcattggcttaggacagattcttatgcagacctccccccgggaagtgagaaaacagttaatattttagtatgcagggcccagtccagaaaacaagccgttctaggtgtttccatggagaagcgtcaatacagggaattctcttaagtggggaattaagaaaaagagccaacagtggaaatctcttacctcaggtgtgactgggaggttgtaagaggaggccggttccctggtcatcagtgagaaccgtggcagcgctgcctcctaggagctaggaccatagagggttgtggtaaatggagccatgccaaggacaaannnnnnnnnnnnnnngatagaaatcgagccggggctgagtcagataccaaggcctccccaggcctccccaggtttgtcctcatagcctcaccagcacctcagagttccaaggtacctgaaagcagctggtgagggccctggggatggagattccctgggttgcagagcagagcaagagctgt

SEQ ID NO: 4750 - DNA, 1399 bp, Cricetulus griseus; identical to SEQ ID NO: 1108
  misc_feature (126)..(143): n is a, c, g, or t

SEQ ID NO: 4751 - DNA, 600 bp, Cricetulus griseus
cctgcagaaacctcttcggcccggtcaatcacgaagagctcacccgggacttggagaagcactgccgagatatggaagaagcgagtcagcgcaagtggaatttcgactttcagaatcacaaccccctggaagggagataccagtggcaggaggtggacaagggcagcttgccggagttctactacagacccccgcgcccccccaagggcgcctgcaaggtgccggcgcaggagagccaggatgtcagcgggagccgccaggcggtgccttcaattggctcccaggcatactctgaggaccggcatttggtggagcaaatgcctgatccgacggacagtccagcggggttagcggagcagtgcccagggatgaggaagcgacctgctgcagacgattcttcttcgcaaaacaaaagggccaacagaacagaagaaaatgtttcagacggttccctgaacgctggctctgtggagcagacgcccaagaagcccggcctccgaagacaccagacgtaaacagctccaagcagctccgaattaagaatatttccttgtttattagatacatcactgctttatgaagcaaggaagatatacatgc

SEQ ID NO: 4752 - DNA, 1400 bp, Cricetulus griseus
cagtaccaggctctccacatccaaagatggctttgctttcagccacgagattgggtgtgaataaaaataattcttgtccttttatttaacacttgtgatgagaagtcagctgtcctttgctgatactcggtgatctagattctcctctgtgtccctaattcttggtagtcaagaaaaattccattttgcgacaattttgtcagatgctgatagaccagcttcatcacatgtgaggttgtctgaaatggaaagctctgtagaaagggtgtgtcttttctgtttcagttgtgagcactaggtcagctgtgcggctggaaacgtcaagaatgcagatcttgcactgaggagctggacattgctcattagttctcccattgggttagtatatgcttctacgtggtaaaatcacattaccactggacagacaaacagccagtgtctgtcattgccctcagtggtccctcatcctgtgaagattaatattaggaactgagggaggggactgtggctctcagtgagatctgctcacgagccacatgtgagaagacactgaagggtggctctccatgtcattccatatgacagtgctcttcatcctggatcaaaggctttattactgtagcctgattcgaaggaactctgccctgtgaggacctatcattcctcatctgttaggctctacacccccaagccatggtcccaccattgaaggtgcctgtgactcctttccacctatttattgctatggacagtgacagagattaagtgcttttctaggttagccatttcttagcatctgaatttgataatttgtcttactgagctaacagatattttaaagacatccagcgtttttgctcaccgagagagatggctgctagtccccgctggcacatcctctggcaccacaggcaatgagagggtgttagggtggagctcttcaccacctcatggtgtggggatggtgcgctgggcggacttgatacacttaatgctcatggatagactgacatcggtctgggactgactgagaggtttgtcttctggtgttgaagtgttagtacattctgggtatgaaaggcattcgatatatttttcttaattatggggtttatttttctaaatatgggttaatcagcttgttgactgggcatgcccttaaaaggaatttaaatttcccactgtggaccttaaagaatcagggaattttgtttgttaaattctctttgggagaacagaacttctcttccctgaccactttattatctttgatttttttcaaagggcctcgattggtggttgtgcctcagctagactttatgggactttggttgttatatagtgggcatatataaagcctgaagtatactaaataaagttatttatttaaatataaaaaa

SEQ ID NO: 4753 - DNA, 434 bp, Cricetulus griseus; identical to SEQ ID NO: 1111

SEQ ID NO: 4754 - DNA, 600 bp, Cricetulus griseus
gagcccccagtctggctgtgaccctaggccgggctcctcgctcttgtggccttggctgtgtcagagacagtcctttgtctcacagtctgttctgctgtcgaccccctccccctgcagtctccattgaggacatccaggaagtaaggatggggcaccgcacagaaggcctggagaagtttgcccgtgacatacccgaggatcgctgcttctccattgtcttcaaggaccagcgcaatacactagacctcattgccccgtcatcagctgatgctcagcactgggtgcagggcctgcgcaagatcatccatcactcgggctccatggaccagcggcagaagctgcaacagtatccttttgggggcagagggtcatggctgggtgtggaatgtgtgtcggtcattttgtgcagctcttaacaaaataccagaatgtattagttacttttctgattgctgggatacttgacaaaagcaaatcaagaagaagggtttattatcatggtttgagagaatgctgtccatcatggcggaagaggcagtaggagcaccggagacagccagtcacattgtgtctacagtcaggaagcagagtgctgggccc

SEQ ID NO: 4755 - DNA, 600 bp, Cricetulus griseus
  misc_feature (543)..(558): n is a, c, g, or t
acggcgtgggccaggacgtagccagccgtcagaccgcagtcattaccaataatggtacggtatgcgctggctgctttgggccaggctgctggtgctggcgaccttgctgttggtatagtgtttgtccttcctaggcttcaacccatggtgggacacagagtttgagtttgaagtggccgtgcccgaccttgccctcgtccgctttgtagtagaggactatgacgcctcctctaagaacgactttattggccagagcaccatcccctggaacagcctcaagcaaggtgagtattagaagcaggggggcagccaggagcagtgggaggagcctggcttctctcagcctgcccctcactacgccttgagtatcctctccgagtgaccagaactgtctgtccttcctgccagggtaccgccacgtccacctcttgtctaagaacggagaccagcatccatcagctaccctctttgtgaaaatctccctccaggactaagcctggggattgggtgagatccaccctgagtgggtcaagctgtgtccannnnnnnnnnnnnnnnagctttgtgtcgccgactgctgatgggagctttaggcctgga

SEQ ID NO: 4756 - DNA, 600 bp, Cricetulus griseus
tcctgcctaatggaggccttggaagataagcgagtgaggttgcagccggagtgcaaaaagcgtctcaatgacagaattgaaatgtggagttacgcagccaaggtggccccagcagatggcttctctgatcttgccatgcaagtgatgacatctccctcaaagaactacatattatctgtgatcagtgggagcatctgcatattgttcctgattggcctgatgtgtggacggatcactaagcgtgtgacacgagagctcaaggacaggtagagctgcctgatcaccaaaggaactacctgcccagggcccagtttgtacagccttcctgtatagtgcaccctctcacttcgtccttctacgagtggcaccaacacccacwgtagagcagcatcaggtgccctctgcatcttcccatccagacttggccacatccgccgtgtcctcctcccacgctgccactgcagcattggcagctggctgctttggtggtagcctttgttggcgaagggtttacctgcctgtagacaattctgtcctaccaagagaactgccagtacttccagaaccgactcacctgacctgcaactcagattttttttt

SEQ ID NO: 4757 - DNA, 356 bp, Cricetulus longicaudatus; identical to SEQ ID NO: 1115

SEQ ID NO: 4758 - DNA, 1027 bp, Mesocricetus auratus
cgaacggcgagcagcggcggcggcgcggagagtgcagcggaggtttttgctggtttcggaccccagcggccggatggtgaaatcctccctgcagcggatcctcaacagccactgcttcgccagagagaaggaaggggacaaacgcagcgccacgctccacgccagccgcaccatgccgctcctcagtcagcacagccgcggcggctgcagcagcgagagttctagggccgccctccattgctgtagtaacctgggtccggggcctcggtggtgctcctgatgtccctcacccacccctgaagatcccaggtgggcgagggaacagtcagcgggatcacagtctttcagctagcgtcctctactccgatgagcggctgaatgtgacagaggagccaactgctaacgacaagaccagggttctgagcatccagtccaggctcacggaggccaagcaggtcacctggagggcggtgtggaacggcggtggcctctacatcgagctcccagctgggccctcgcctgagggcagcaaggacagtttcgcagctctcctggagttcgcggaggagcagctccaggccgaccacgttttcatctgcttccccaagaaccgtgaggacagagccgccctactccgaaccttcagctttcttggctttgagattgtgagacccgggcatcccctcgtccccaagagacccgacgcttgcttcatggtctacacgctggagagagaggactaggtgccggccctgcccgtgtccctgtgcctctcccgggtttgtccacatgtcctgattgtgcagaataaacgctcactccattagcgggtgcttcttccgagctgaatgctgtgtttgtcacactcaagtgttggctttaattctaaataaaggtttctattttactgtttttattgctgtttaagatggtcaggtgacctgtgttagcgcagcctcctttgaagcctggcagagatagatagtgtcacctcccttggctcaaacccaataagtgatctcgctca

SEQ ID NO: 4759 - DNA, 314 bp, Cricetulus griseus; identical to SEQ ID NO: 1117

SEQ ID NO: 4760 - DNA, 121 bp, Cricetulus griseus; identical to SEQ ID NO: 1118

SEQ ID NO: 4761 - DNA, 600 bp, Cricetinae gen. sp.
atctgttataatggaatttaatttattactacccaacttcccaagcactttctagctagttaagggcacttttcctcagtgtgaactctgaacatttgatctgtgccatgatcaaccaatgatatacatcttacacaaccaaatttatttgcctgtcccaagccataggtgtatgcactaagaggattgttgggtgttttcataagctttacatgttctcttgcctaacaaaacttactacaactttccaaacccaaatcctcgcattttgttcccagtttccttcattcaatttaataaccattttgagtttctgcttgaatttgtaagactgttgacacctaggaattgtcctaggcctcagctgagatttgcacctgaagcaattattgacatgaactccccaatggaagaaatttagttttgtttcttaagggctttttgtattattatctcacatacattttgataacctgtcaggtagacattattttccttttcttaaaccattatatgtcagtattgctcaatagaattatcaagtatttgaaagccaaaggtatagatgccaaaaaagtaaaaaaaaaaaaaactcgtgcc

SEQ ID NO: 4762 - DNA, 600 bp, Mesocricetus auratus
ttcctacacgccgctggcccctccgcagcagcagatcgtggccatggagcagagcccctgcggaagcagcgaccccttccagcagggcctcacgccaccccaaatgccaggtgaccacatgaacccctatgggaacgactccatcttccacgatatcgatagtgatacctccctcaccagcctcagcgactgcttcctcggctcctctgacgtgggctccctgcaggcccgcgtggggaaccccatcgaccggctctactccatgcagagctcctactttgcctcctgagagccagctgggccgcatggacgcttgggcctgggcctagggtgggaccacaggcctctgcagccagccggccccccagcccaccacccactcagactctacagacagccatacggtgccctcccctcggccagccggacctggctcaagtgcccactgggcacagccagacaggcagatgggtgcagcctgggcaggggttgtgtcctgcccacagagaccgcgtgactcctggggacccagagctctgggacagccactcacctcccagctctttgaccccatcacctcctctcccctccccatctctg

SEQ ID NO: 4763 - DNA, 600 bp, Cricetulus griseus
gagcagcaaaaatacagacttcttcattggcaagccgaccctgagagagctgacgtctcagcacccttatgcagaagtcttcatcggccggccacacgtctggaccgtggatctgaacaatcgagaggaagtagaggatgccgtgaaagccatcttaaaccagaagattgagccgtatatgccgtatgagttcacatgtgaagggatgctgcagagaatcaacgcgttcatagagaagcaggacttctgccatggccaggtgatgtggcctcccctgagcgccttgcaggtgaagctggctgagcctgggcagtcctgcaagcaagtgtgccaggagaaccagctcatctgtgagccatccttcttccagcacctcaacaaggaaaaggacttgctgaagtacagagtgacctgccaaagctcagaactgtacaaggacatcctggtgccatccttctaccccaagagcaagcactgtgtgctccaaggggatctcctgctcttcagttgtgccggggcccaccccacacaccagaggatctgcccctgccgggacttcatcaagggccaagtggccctatgcaaagactgcctatagca

SEQ ID NO: 4764 - DNA, 600 bp, Cricetulus griseus
cgcctggaacaggaaagctcagcccaatcagcagagtcggcccgcagctccgctcaatccgcaactccgacccgcgcagcccgcggagctcccgccgccggtctgggcagcatgaggcgcgcggcgctctggctctggctctgcgcgctggcgctgcgcctgcagcctgtcctcccgattgagccgtatatgccgtatgagttcacatgtgaagggatgctgcagagaatcaacgcgttcatagagaagcaggacttctgccatggccaggtgatgtggcctcccctgagcgccttgcaggtgaagctggctgagcctgggcagtcctgcaagcaagtgtgccaggagaaccagctcatctgtgagccatccttcttccagcacctcaacaaggaaaaggacttgctgaagtacagagtgacctgccaaagctcagaactgtacaaggacatcctggtgccatccttctaccccaagagcaagcactgtgtgctccaaggggatctcctgctcttcagttgtgccggggcccaccccacacaccagaggatctgcccctgccgggacttcatcaagggccaagtggccctatgcaaagac

SEQ ID NO: 4765 - DNA, 1400 bp, Mesocricetus auratus
  misc_feature (467)..(484): n is a, c, g, or t
ccttgaaactcaaggaagctgccgtgagacagcgtgaagctctcaagaaactcaccaagaacatcgccactgactcgtatatcagtgttaacttgagagatgtctatgccaggagcatcatggagatgctccgattaaagggcagggagagagcaagtaccagaagcagtggtggagatgatttctggttttaaatttaccttctacttatttatagaacctatgcccatgtgactggactgctgaagccttgcttctgtggatgagtttcctgaacacttctcatcctcttcccggtgtattgattttctccgaatactaaacatctccttagcaactactgattattttgacacacctatcttcaacatagctaattaatacaaccaaaatcatttgggaaaagaaccacatgtctggattttcaaatattaattaatataatttcatacatcaaagtttaaagnnnnnnnnnnnnnnnnnntttcatacatcaaagtttaaagacccatgtgtcattgtttttaggttttcccacctttgcattttttttttactggaaattgaactgaacagcccagagtggggggggggaatgagtgaatgtttaaaaatatactgaacatcttttgggtatttagaaaatattctccaaatagattacctttttctctataaattaaagctgttgagtataacgataggctttgcaagcaaacactcaaccttggtggttatagagggtacctcatcttccatcaagtgctaatcactgggcccaaatggacagggctctgcctttcaccactccagttgcaagggacctcagactgctcagagtgcagtaggtgaggcttcaagtgcctagaaagcttcatcatcccagttaagtgcgatgtgtaaagaagaaagcagcatagtcatttgtgaaaagtagatggcttgtaaaatgtctcattacagatgaattatttaagttatgccttcaaaatcatgaaatcatgaatatggaaaagtgaagtcgttaagatcctaactttattcattgaaaagattggatagtctttttataagcgaaaatatgttgaaaggtatcgttagatgaacttgaagatctttttatttgttaaaaaatattgtggaaagctttctgattgtggaggtaaataacaaatgttcagactttgcaggtgctttgacagtgtttatggtaataatacgatgcctaaatgatgtggcatataattaaagccaaaagttttaaagctaagaaataaccctggttctaatataatagtaagtaatattttcaaaagtctaacaaaggattccctcattgcctactttcttgatgtatgcaataaagttcctaaagaaaataaaattggttctgggataga

SEQ ID NO: 4766 - DNA, 1380 bp, Mesocricetus auratus
  misc_feature (652)..(723): n is a, c, g, or t
atgaaaatgaagaagcggaagtagaagaaaacgagcaggtcaccaacggcaccagcacgaactccacagaggtgtacggtgggaacggcagtagcggaggatacaatggagaagaaggcgaggaacagagcgtcaccgaagcaggtgtagaaggaaccacagtgggcagggagcagatcagtgatggccccacgacagcagtccttatgaatgggtttcagtatacaaccccaccacctgaagcctatggcaccacctccccaccattcagaaaacccaccaccgttgagtactggggagaatatgaacaaacggggaacaatgagtacaatggtgagtatcaaatctatgacaatgagaatggggagcctcgtggggacaattaccgagcctatgaggatgaatacagctactacaaggggcgtggctatgaaggctatgatggccaagattactactaccaccagtgaagccccacaccgccggggagggggggaattacccattctgtcattgcatctggctaccatttattttcaaagttcaactcaggaaggtgcaatatatcaaatgtgcattttacaatgttgaatggtgctacagtcccagagcgatttctgcaaatgcttctatttgtaatggcttctttttnnnnnnnnnnnnnnnnnnnnnnnnnnnnnnnnnnnnnnnnnnnnnnnnnnnnnnnnnnnnnnnnnnnnnnnntggggctggatggaatgctttgaaatggtaactctacagtgtttgccctattgctaactgcccaaacatactctttgtacaagatagatcaaagagagatttagaaacgacactgtatacaataattgtgtattcctatatcatacccactatccaatactgtagtaggtttaattctcatcctcatgtatttatatggcctgtatgcacgggttttaccgtaaataaacatgcaattcttcaaatgtgttataactaagaaggaatggggaccatgggaaagcagagggctttaaggagggctgtacaagtcagctaaaaagcaggcttatttccatcagggtttaatactcagaggatctgaaaaccatctcagtgttctctcctcaataaatctgcatgactaaggtttgacaattgagggcagaatcagctatatacaccagggaataaaaacttcttagagttgccagatttaacaagcatagatccatggtgtgaaatgcccacttcagtttgaatttcagataaacaatgattggtttttaatgcaagtgttcccccccccatgaataattagtctctgtgaaatatctggaataaacttaacgctgaataaatgacatactttaatattcaactgtaaaaaaaaaaaaa

SEQ ID NO: 4767 - DNA, 1400 bp, Mesocricetus auratus
  misc_feature (363)..(432): n is a, c, g, or t
gccctggatggatcagtcaggttcggcgtcggagctctctgcttggttctcagctggaagcggcactctacagtgagcaggagctgtcctatatccagcagggagaggtggctatgcagaaggccttgagtatcctcagcaaccaggaaggctggaagaaagagaaccagcaggaaaacggggatgaggtgctgagtaaagtggtccctgatgtgggcaaggtatttcggctggaggtggtggtagaccagcccatggacagactctatgcagaacttgtggaccgcatggaggcaatgggagagtggaacccaaatgtcaaggagatcaaggtcctgcaaaagattgggaaagacacagtcnnnnnnnnnnnnnnnnnnnnnnnnnnnnnnnnnnnnnnnnnnnnnnnnnnnnnnnnnnnnnnnnnnnnnngtgccaagcgccgaggctccacctgtgtgctggcaggcatagccacacattttggggagatgcctgaacaaagcggtgttatcagagctgaacagggtcccacctgcatggtgcttcacccactggctgggagtccctcgaagactaaattcacttggctgctcagtattgacctcaaggggtggctgccgaaaagcatcatcaatcaggtcttatcacaaacccagatggagtttgccaaccacctgcgcaagcgcctggagtccagctctgcctctgaggcccggtgttaagactgtacccactacatcaacctgcatgccatcagcagcctcccgcaggaagcctgcaagtctgtttcaaatctccagttgatgactacgggaggggtagtacttatcagacactaggactgactggcgaaacatgaccatcaggaaattagcaatgaggctgagcagaagagagcctcagcctctcccacaagattagctgtgaagtgggctaagagatagacatgctaacacttttatgtaggcctgtgtatgctcacctaaaaaccctactcaaaacgcaagtagttagtgtgacaagggggggtgtttaggaactgttgtcttctgagctcaaagccactgcctgaagcagtgtgtgcacacagcaaggcttccccagggacttcagtgaccctctgttcctccataaaaggccaagaacatcaaaccactcacaaacagacccttccagagtacactccaagttctctctaaggagaaaggaaactaaatattacgttggcttccctacttattacatcacaataaagtaccacacatgaaatttcagcctatacttgtcaagtcctatggcacagaatctgtgctgggagccacagcttcatcagagctctggatcaagactgtgggttccaatttcctagttcattaaaggaacaaaacttcacattt

SEQ ID NO: 4768 - DNA, 600 bp, Mesocricetus auratus
cgtatcaggcctgtggcccccatgctcatcccccacagggcaaacagtgacatgagcattggtgagtttagcatccccaagttcacacccgtgatcatcaatttgtgggcactgcatcatagtgagaaggaatgggaccagccagatcggttcatgcctgagcgcttcctagacccaacgggaagccatcttatcacaccctcattaagctacctgccctttggagctggagcccgctcctgcatcggagaggttctggcccgccaggagctcttcctctttatggctcacctgctgcagaggtttgacctcgatgtcccagatgatgagcagccgccctgcctgaagggtaacgccaacgtggtctttttgatagaccccttcaaagtgaagatcacagtgcgccaggcatggaaggatgcccaggcagaggttaacacctggaggccataactaatgtcccctggtcctatattgtgcagctcacagcacaaaattagaggtgctactcctactgcctcctatagtcctcttccttcctgtcctgttttctggtttgcagcaatggagggtgatatgctaaattaaagattttccaat

SEQ ID NO: 4769 - DNA, 600 bp, Cricetulus griseus
gacaagatggagccatctgcctctgggatgtactcacaggtagccgggtcagccatacattcgctcaccgtggagatgtcacctccctcacctgtaccacttcctgtgtcattagcagtggtttggatgacctcatcaatatctgggaccgcagcacaggcatcaagctttactccattcagcaggatctgggctgtggtgcaagcttaggtgtcatctcagacaaccttctggtgactggcggccagggatgtgtgtccttttgggacctaaactacggggacctgttacagaccgtctacttgggcaagaacagtgaggcccagcctgcccggcagattctggtactggacaacgctgccattgtctgcaactttggcagtgagctcagcctagtgtatgtgccctctgtgctggagaaactggactgagggcaggttgaccatacaacccactcgcccccacccagagtggggcctgtgggcagcaattctttggacctagactggagacaagagctaggcatctcctttgcagctgtctctaaactgttgtctcctgactgtaatattaaacttttttaaaaaccaccaaaaaaaa

SEQ ID NO: 4770 - DNA, 813 bp, Cricetulus griseus
ggaagatggcggcggccgcggagctgaagctgctggagaagtctctgggactgaggccggggaataagtacagcgctcagggcgagcgacagattccagttctacaaacaaacaatggtccaagtctaacgggattggctaccattgccacccatctagtcaaacaagccagtaaagagcacctgctggggagcactgcagaagaaaaggccttggttcagcagtggttagagtacaggatcacccaagtggacggacactccagtaaagaagacacccacaccctgctgaaggatcttaattcttatcttgaagataaagtctaccttgcaggatataacatcaccttggcagatatcctactgtactacgggctccatcgctttatagttgacctgacagtgcaagaaaaggagaaatatcttaatgtgtctcgctggttttgccacattcagcattacccagacatcaggcaacatctgtctagtgttgtcttcatcaagaacagactgtatgctaactcccactagaagttcctgctgggcagcagcaagattagaagtgtaaaatgtattttggaccatggttctaatgtaaattaatgtgatgtcattgtttctttgttaatgttggtagaatttttaacatgtaaactcaagtctgaatgttttatttgtcccttagttgaaggtttgcagttttttaatgtaaaaattcaactgttattcaagcaaatcacgattagattataaattatctcatatttataggtgaaatttattttaataaaatttgcttatcagtggcagaaac

SEQ ID NO: 4771 - DNA, 600 bp, Mesocricetus auratus
tatccttcttggagtcttcatcttctgttgggccccctttatcctccatgtcctcttaatgaccttctgcccaaataacccttactgtgtttgctacatgtctctcttccagatcaatggcatgttgatcatgtgcaatgcagtcattgacccctttatatatgcctttcggagcccagagctcagggatgcattcaaaaagatgttttcctgccacaggtatcagtagactttttgatccctgatttaaataatgtaaagagaccaacacggcatgacagtctgacaagtgatgatgcatcttagcagcctttctttctttaatagatggagtcaatcaattaaactgactagtgtttagcatagctggctttctaatgaagtattactgcagctgcaaactttatattgtatctagagagatgaaatggtaggctaaatagacgtatcgagtacacatcaatacaaatgtgaggatttggggttaagcaagtatttgttcttctgtgggtacctggaaaactgtcctggaaggcctttccaggtcagaaaccatgacaaccaattctccaactaattaaatgtgttggttagattcct

SEQ ID NO: 4772 - DNA, 600 bp, Mesocricetus auratus
  misc_feature (239)..(338): n is a, c, g, or t
  misc_feature (406)..(420): n is a, c, g, or t
  misc_feature (446)..(483): n is a, c, g, or t
atggacagtatttgagctgaaaacacaggccttgatatccatctgggcttcctgtgtttagtgaggtctccagagcccggctaggccctcggggccccacaggaggtcccctttgccgcatggtggcagcactgagcggctcagcaggagctgggccagagctctgccctgctgaggaggtcggatggagctcccccctccctgtgttccaggtgctgaaatccttcagggtggagacnnnnnnnnnnnnnnnnnnnnnnnnnnnnnnnnnnnnnnnnnnnnnnnnnnnnnnnnnnnnnnnnnnnnnnnnnnnnnnnnnnnnnnnnnnnnnnnnnnnngcagctggggtcccagtcaggccagcagctccctcctgtcctgacacccaagggcgcacttctttgcnnnnnnnnnnnnnnnttgggcccacactgtcatccatcagnnnnnnnnnnnnnnnnnnnnnnnnnnnnnnnnnnnnnnaggagttgcaaggccagggaagggactgggatgatcttgcagctcacgagcagtccctgccgggtgatttcacccatcctttccaagagtcactccagccacctgtggccttccaaa

SEQ ID NO: 4773 - DNA, 600 bp, Mesocricetus auratus
ctgcaccacaaggtgtacgatctgaccaagtttttggaagagcaccctggtggggaagaggtactgagagagcaagcggggggcgatgccaccgagaactttgaggatgttgggcactctaccgacgcccgagaactgtccaaaaccttcatcatcggggagctccatccagatgacagatcaaagatagccaagccttcggaatctcttatcactactgtcgaatctaattccagttggtggactaactgggtgatcccagccgtctcagccctggctgtagccctgatgtaccgcctctacatgggcagaagactaacctgcttctccaaaccagggacgggggaaggactgccccagagaaggggagaaaagaagccagtgttaatcacttccgctgacagaaaccttcccctgaaaggtaagtaatatatctgtttccctttccttctgtgttcgttgaacaaataagaaactctttgtgctcttaaacttttcaaatgtgcctttttattcatcaactttattttgatgtttcttcactacgtaatttacttattgtaagctgatctttttaaaaatatatctggcttttaaaat

SEQ ID NO: 4774 - DNA, 600 bp, Mesocricetus auratus
gtaccgaggcctgaacctcaccgaggacacctaccagccccgactttacacctcctcaacctggagcaccttggtgacagagagttcctcgaggtcacgggcggcggtgcaagtgtatgggtatgcgcagtactatccatatggctatgattcaaggcggtggtactacccctaccagtccttccagaccccgcaacaccccagctttctcttcgtggacaagctgatctcctggtcagccacctacctccccactgtccagagctgctggaactacggcttctcttgcacccccgaggagctccccgtgctgggcctcaccaagtccagctactccgagcctgccatcggctatgaaaacaaagcgctgatgctctgcggagggtacagtgtggtggatgtcgccaacttcgcaggctctaaggctcctatccccagtgctctggataccaatagttccaagatttcgtctctctttccctgcagctcgggggccttcagcggcttccgcgtggtcatccgccccttctacctgactaactccactgacctggactaggtgggtccatctcactggtggggactcagacacccacgtgt

SEQ ID NO: 4775 - DNA, 573 bp, Mesocricetus auratus
agtgcgtcaccacagccctccagcatcgcgcctcggcgaccgcaagaacctcggtgaggacggcaggctgaaggtgacttccatgcgcgtgggcagctagatagggagggaatgatgaaacttaaccttgatgccacgcaagaaatcttgagggcacatgccagttgggtacggccgagagattctggcagacttgggggggaggggaaaaagaggcctggctcggaaaccttttgaggtggcgcctctgttggggacgtctctccctgcctccaagactctttccttggtcaaataaggagaactggactccacaggggcgaaaagggtacaaacttgagcattcgccgatgtccagcgggcaagccggtctgggtgcctttgtctgcccagaaacaacggctgggtcgaccattttaaggttaggaatcatgaaaatgaactgctagaggtttcaaagttgcggggacgcgtgtgcttcttcctgccggcccttcctcttcgcctgctccctcctttcctacttcccctcccctagattcttcccctctttagtaaaatatttcattacat

SEQ ID NO: 4776 - DNA, 492 bp, Mesocricetus auratus; identical to SEQ ID NO: 1134

SEQ ID NO: 4777 - DNA, 224 bp, Cricetulus griseus; identical to SEQ ID NO: 1135

SEQ ID NO: 4778 - DNA, 1400 bp, Mesocricetus auratus
aattgtctccaaagagaattaaagtggaggacggatttccagacttccaggaacctgtgcaaacactcttccagcaggccagagccaagagtgaggagctcgcagccctgagttcacagcagactgaaaaggggatggcaaagcagatggagctcctgtgtgcccaggccagctatgagaggctgcagcaggagaggaggctgacggcggggctctacaggcagagctccggggaacacagcccggatggcctgccctctgatggctcagatggacaaggagaaagacctttgaatctccgaatgcctaatgtacagaacagacagccccatcattttgtggccgatggggagctaagcagactttactccagtgaggcgaagtcccactcatcagagaacctcgggattttaaaagactaccctcactctgcttttaccttggaaaagaaagttattaaaacagagcctgaagactcaagatagcctagattctcccactgtctctgaaaatggcaccagattcaaggataatgctccatcatagaataagccttaataaccagtgttgcctcattctgctcaaacagaccatagccaaagcataagaactcacagtagtctgtggaaaccaggacaaagcaacagccacagaagaagaaatcgagagagtgctgcaatgtaacaaacactgaccattaccttcctgtgtaagttgtttgtatggaaaggctcaatattgtaggcattcactatttaagaatgtacaatgtgtctgtgtaatttatagaagcaaatctaggtgttaagacctttggtctaatagatgtggagaccattctttttacttgaaattttgttgtctactttaagtgtatttacggtaaatgttactcatcaacatttaggacttttgagtcgtaaaaagaaagcttagcaatgtagttattggcaaggtgacagtggctggagagaaatggaaggcaaatactcagtttacaccaaggaaaagactgtgtacttaatacttgattaaaattgattttggttaataggaaatgtgtagccgtcactaaataatgccgctttcattggtttaatccatgcacgaattaaaaatggaataatatttccgagatgaggtaggctacatttatgacagctgctcaagatgtgagacagaagacttgaagtaagcaggctaacgtgtaagagccttgacttaaacattggtatttcagaggatgtcaagtaaattaaggcagagtaaattaaccctgaatgtttaagataaagatgccgtgggagaatgacatggaggctgtgttttgtttttagtcctgctttgaatcatggctgtaataaatatcggtcctagtctgttctgtgagaaaaaaaaaa

SEQ ID NO: 4779 - DNA, 559 bp, Cricetulus griseus
  misc_feature (208)..(258): n is a, c, g, or t
gtgttacttagtcttgtgtgaagctgccttccctaagaagttggcctttgcctacctggaagacctgcactcggaatttgatgaacagcatgggaagaaggtgcctactgtgtctaggccctattccttcattgagtttgataccttcattcagaaaaccaagaaactctacattgatagtcgtgctcggagaaatctaggctccatnnnnnnnnnnnnnnnnnnnnnnnnnnnnnnnnnnnnnnnnnnnnnnnnnnnagtcttacagcggggggaagcactctcagcattggactcaaaggctaacaatttgtccagtctgtctaagaaataccgccaggatgcgaagtacctgaacatgcgttccacttacgccaaacttgcagcagtagctgtatttttcatcatgttgatagtgtatgtgcggttttggtggctgtgagatgtagtgagcctagtcactggtaagggagaatctagaacccggcaggtgtatgttttcaggaaactgagctcacagggctgtgtattagaacccaagtggaacttctgcctctaa

SEQ ID NO: 4780 - DNA, 359 bp, Mesocricetus auratus
agattctaaaggcatctctggtgaacatcccaagggataccgtcaacctctacaccacctctggatgcctctgccccccacttcatgttaatgaggaatacatcatcatgggttatgaagacgaggaacgctccaggctactcttggtcgagggcaccatcgttgagaagtggaaagatcgkmttggkrwgaargtcaagcgctgggatatgaaacttcgycatcttggactgggtaaaacggatgctagtgactccactcagaatcagaaggctggcaggaactctaatccccggccagcaggaagctaagtcctgaaatgcgaaagaccacacccattgactcccctactaagcagt

SEQ ID NO: 4781 - DNA, 215 bp, Mesocricetus auratus; identical to SEQ ID NO: 1139

SEQ ID NO: 4782 - DNA, 191 bp, Mesocricetus auratus; identical to SEQ ID NO: 1140

SEQ ID NO: 4783 - DNA, 338 bp, Mesocricetus auratus; identical to SEQ ID NO: 1141

SEQ ID NO: 4784 - DNA, 243 bp, Mesocricetus auratus; identical to SEQ ID NO: 1142

SEQ ID NO: 4785 - DNA, 225 bp, Mesocricetus auratus
caaaaatccatcaatgtaatccaccactgaggtctgcaatcaataaatgggacctcctgaaactgagaagcttcggtaaggcaaaggaaacagtcagtaagacaaaaacgaccacccacagaatgggaaaagatcttcaccagccccacatctgacagaggactgatttccaaaatatacaaggagctcaagaagctagccaccaaaacaccaaacaatgaaatt

SEQ ID NO: 4786 - DNA, 145 bp, Mesocricetus auratus; identical to SEQ ID NO: 1144

SEQ ID NO: 4787 - DNA, 381 bp, Mesocricetus auratus; identical to SEQ ID NO: 1145

SEQ ID NO: 4788 - DNA, 412 bp, Mesocricetus auratus; identical to SEQ ID NO: 1146

SEQ ID NO: 4789 - DNA, 224 bp, Mesocricetus auratus; identical to SEQ ID NO: 1147

SEQ ID NO: 4790 - DNA, 600 bp, Cricetulus griseus
  misc_feature (32)..(71): n is a, c, g, or t
tgtggtctgagaacacatgcagagcttgaagnnnnnnnnnnnnnnnnnnnnnnnnnnnnnnnnnnnnnnnngctaattgctgacgacaacacagttattattggctctgccaacatcaatgaccggagcatgctcgggaagcgagacagtgaaatggctgtcatagtgcaagacacagagacagtcccatcaataatggatggaaaagaataccaagctggctgctttgcccaaggacttcggctacagtgcttcaggcttgtccttggctatctttctgatccaagtgaggacctccaggatcctgtgagtgacaaattcttcaaggagatttgggtttcaacagcagctcgaaatgctaccatttatgataaggtgttccgttgccttccaaatgatgaagtgcacaatttaatgcagttgagagactttataagcaagcccatattagcaaaagatgatcccattcgtgctgaggaagaactgagaaagattcggggcttcttggtgcaattccccttttatttcttatctgaggaaaacctgctgccttctgtaggaaccaaagaagcaatagtgcccatggaggtttggacttaa

SEQ ID NO: 4791 - DNA, 1400 bp, Mesocricetus auratus
  misc_feature (258)..(272): n is a, c, g, or t
  misc_feature (655)..(697): n is a, c, g, or t
aaaagcggaggaactctaccagaagagagtgctgacaattactggcatctgtatcgccctgctggtggtcggcatcatgtgtgtggtggcctactgcaaaaccaagaaacagaggcaaaagcttcatgatcggcttcttcagagtcttagatcggaacggaacaacatggtgaacatagccaatgggcctcaccatccaaacccaccaccagagaccgtgcagctggtgaatcaatatgtatctaaaaacatcatctnnnnnnnnnnnnnnnttgagagagaagtggaaacctccttttccacaagtcactacacttccacagctcatcactccacgactgtcacccagactcctagtcacagttggagtaacgggcacacagaaagcatcgtttcagaaagtcactctgtaatcatgatgtcgtcagtagaaaacagtaggcacagcagccccgctgggggcccacgaggacgtcttcatggcctgggaggcctccagtgtaacagcttcctcaggcatgccagagaaacccctgactcgtaccgagactctcctcacagtgaaagacataaccttatagctgagctaaggagaaacaaggcttacagatccaaatgcatgcagatccagctgtcagcaactcatcttagatcnnnnnnnnnnnnnnnnnnnnnnnnnnnnnnnnnnnnnnnnnnngcctttaggaaggtatgtatcagccatgaccaccccaactcgtatgtcaccagtagatttccacacaccaagcacccctaaatcgcccccttcggaaatgtctccacctgtgtccagcatgacggtgtccatgccctccatggcagtcagcccatttgtggaagaagagaggcctctgcttcttgtgacgccaccaaggctccgggaaaagaagtatgatcacctccagcaactcaactcctttcatcacaaccctgcacatcagagtaccagcctcccccctagcccattgaggatagtggaggatgaggagtatgaaacgacccaggagtatgagccagttcaagagcctgttaagaaactcaccaacagccgacgggccaaaagaaccaagcccaatggccacattgccaataggttggaaatggacagcaacacaagttctttgagcagtaactcagaaagtgaaacagaagatgaaagagtgggtgaagatacaccattcctgggcatacagaaccccctggcagccactcttgaggcggctcctgccttcctgctggctgatgtcaggactggcccagcaggccgcttctcaacgcaggaagaattgcaagccaggctgtctagtgtaatcgctaaccaagaccctatcgctgtataaaacctaaataaacacatagattcacctgtaaaaaaaaaa

SEQ ID NO: 4792 - DNA, 396 bp, Cricetulus griseus
atttgtgatgcagaagttgacagatcatttaataggcaagacttttctgtgagactatttgaatattaagagcactgacctcaaacaaaactcatctctttcttatgggatcctgagttagtttatgatgtgaaagcaaattggtataaagcaagcctgatagctaaatcacactctggcttccaggcttgaatcctttcctcccccaccaggtctttcctgagtcaaaatgttgatacctgtgttatctccagaagcatatctttataagtctttagcaccgtaagctaaaccaattaaactataaagttagctggtctacctcgggttctgtgttttagcaacaaaaatgcatggatacacttggaatggtgcctctttaaatagtcactttaa

SEQ ID NO: 4793 - DNA, 561 bp, Cricetulus griseus
acttggcttcttcaccacttatttcttgcccctggccaccactcttaagagtaaagcaatggacctggcccaggcaggcagcacggtggagtccaagatttatgacacactccagtggcagatctggaccctcctgcctgggttctgcacaaggcccactgatgtggctgcctctttcaaaggcctggcacggacactgggcacagccattaatgagcgcccagacctgagggtcactgtgtgccaggccctacgcactctcatcaccaagggctgcgaagcagaggctgaccgtgctgaagtgagccgctttgctaagaacttcctgccaatcctcttcaacctgtatggacagcctgttgcagctggcgaggcggcagtccctcgccgtgctgtgttggaaaccatcaaaatttacctcaccataaccgagtctcagttggtgaacggcttcttggaaaaagccactgagaaagtgctcgatcctgccagctctgacttcaccaggttgtctgtcctggacctggttgtgggctttggctcctcacgcagatgaagccg

SEQ ID NO: 4794 - DNA, 579 bp, Cricetulus griseus; identical to SEQ ID NO: 1152

SEQ ID NO: 4795 - DNA, 135 bp, Cricetulus griseus; identical to SEQ ID NO: 1153

SEQ ID NO: 4796 - DNA, 299 bp, Cricetulus griseus; identical to SEQ ID NO: 1154
  misc_feature (85)..(101): n is a, c, g, or t

SEQ ID NO: 4797 - DNA, 580 bp, Cricetulus griseus; identical to SEQ ID NO: 1155

SEQ ID NO: 4798 - DNA, 131 bp, Cricetulus griseus; identical to SEQ ID NO: 1156

SEQ ID NO: 4799 - DNA, 446 bp, Cricetulus griseus; identical to SEQ ID NO: 1157

SEQ ID NO: 4800 - DNA, 289 bp, Cricetulus griseus; identical to SEQ ID NO: 1158

SEQ ID NO: 4801 - DNA, 463 bp, Cricetulus griseus; identical to SEQ ID NO: 1159

SEQ ID NO: 4802 - DNA, 532 bp, Cricetulus griseus; identical to SEQ ID NO: 1160
  misc_feature (302)..(342): n is a, c, g, or t

SEQ ID NO: 4803 - DNA, 543 bp, Cricetulus griseus; identical to SEQ ID NO: 1161

SEQ ID NO: 4804 - DNA, 441 bp, Cricetulus griseus; identical to SEQ ID NO: 1162

SEQ ID NO: 4805 - DNA, 579 bp, Cricetulus griseus; identical to SEQ ID NO: 1163

SEQ ID NO: 4806 - DNA, 459 bp, Cricetulus griseus; identical to SEQ ID NO: 1164

SEQ ID NO: 4807 - DNA, 575 bp, Cricetulus griseus
gcatgccaaattggcaccacttgcagctatttatcaagaaattcaggaggccgaacaagccattgaagaattagagtcaatgtgtaaaactctacataaacaagacgaaaagcagttgcaagaacttgtatcagaagaaaggcaaatcattgatcaaaagatcaacacactgtatagtgagcttttggagcagctagtgccaaaggagaaatatgacaaaagtgatgttattttagaggtgacatctggaagaactactggaggtgatatctgccaacagtttacccgagaaatatttgatatgtaccagaattattcatactataaacactggaaatttgagctgctgaattacacaccagcagattatggtggactacatcatgcagctgccagaatttctggagacagtgtctataagcatttgaagtatgaaggtggaatccatagagttcagcgaatcccagatgtgggcctgtcgtcaaggatgcagcgtattcacacaggaacaatgtcagttattgtccttcttcagccagatgaggttgatgtgaaagtcgacccccaggatctgc

SEQ ID NO: 4808 - DNA, 244 bp, Cricetulus griseus; identical to SEQ ID NO: 1166

SEQ ID NO: 4809 - DNA, 498 bp, Cricetulus griseus; identical to SEQ ID NO: 1167

SEQ ID NO: 4810 - DNA, 136 bp, Cricetulus griseus
gatgtggaatgtctggcagactcttgcatgaaacaggcaccctgaaagactgtccatcttctttagccatcattttcttgtgggtcctgaatgttcagtttatacaggatacagtcaagcataccatacaagagca

SEQ ID NO: 4811 - DNA, 567 bp, Cricetulus griseus; identical to SEQ ID NO: 1169
  misc_feature (57)..(91): n is a, c, g, or t

SEQ ID NO: 4812 - DNA, 580 bp, Cricetulus griseus; identical to SEQ ID NO: 1170

SEQ ID NO: 4813 - DNA, 580 bp, Cricetulus griseus; identical to SEQ ID NO: 1171
  misc_feature (474)..(474): n is a, c, g, or t

SEQ ID NO: 4814 - DNA, 564 bp, Cricetulus griseus; identical to SEQ ID NO: 1172

SEQ ID NO: 4815 - DNA, 385 bp, Cricetulus griseus; identical to SEQ ID NO: 1173
  misc_feature (280)..(295): n is a, c, g, or t

SEQ ID NO: 4816 - DNA, 365 bp, Cricetulus griseus; identical to SEQ ID NO: 1174

SEQ ID NO: 4817 - DNA, 365 bp, Cricetulus griseus
tttgcaaagtagcaaaagaatgattttatggttgttggttgggggagggtcaacacaacatgatgaactgcattaaaatgttacagcattaggaaggttgtgctatagaggaaataaatgttggaaaatattccaaaggtaatggtagaaatctgagaactaaaagtcacatggagggtaggtgcctaggttgggggtatgggcttcagaggtgcttgttgattgacatccttttgtgctggggatcctgttcctactgtttctccgaaggctttatgttctcttcttggctttctctgatgttcctctttcaataacattgctggtattggtgtgctaaacacacataattttttgctgacttc

SEQ ID NO: 4818 - DNA, 579 bp, Cricetulus griseus; identical to SEQ ID NO: 1176
  misc_feature (414)..(414): n is a, c, g, or t

SEQ ID NO: 4819 - DNA, 432 bp, Cricetulus griseus; identical to SEQ ID NO: 1177

SEQ ID NO: 4820 - DNA, 567 bp, Cricetulus griseus; identical to SEQ ID NO: 1178

SEQ ID NO: 4821 - DNA, 580 bp, Cricetulus griseus; identical to SEQ ID NO: 1179

SEQ ID NO: 4822 - DNA, 578 bp, Cricetulus griseus; identical to SEQ ID NO: 1180

SEQ ID NO: 4823 - DNA, 579 bp, Cricetulus griseus; identical to SEQ ID NO: 1181

SEQ ID NO: 4824 - DNA, 235 bp, Cricetulus griseus
tggcggcgtctgacgccgcgcgtctccctggcggcggtgtgtggtgacggcccgggtcagaatgacttcaacaagtaaggcgattgaattacaactacaagtgaagcagaatgcagaggaattgcaggacttcatgagggacttagagcactgggaaaatgacattaaacaaaaggacatggaactaagaagacaaagtggtgttcctgaagagaatttacctcctattcgaaat

SEQ ID NO: 4825 - DNA, 418 bp, Cricetulus griseus; identical to SEQ ID NO: 1183

SEQ ID NO: 4826 - DNA, 579 bp, Cricetulus griseus; identical to SEQ ID NO: 1184

SEQ ID NO: 4827 - DNA, 579 bp, Cricetulus griseus; identical to SEQ ID NO: 1185

SEQ ID NO: 4828 - DNA, 579 bp, Cricetulus griseus; identical to SEQ ID NO: 1186

SEQ ID NO: 4829 - DNA, 579 bp, Cricetulus griseus; identical to SEQ ID NO: 1187
  misc_feature (518)..(539): n is a, c, g, or t

SEQ ID NO: 4830 - DNA, 173 bp, Cricetulus griseus; identical to SEQ ID NO: 1188

SEQ ID NO: 4831 - DNA, 391 bp, Cricetulus griseus
  misc_feature (60)..(107): n is a, c, g, or t
  misc_feature (118)..(140): n is a, c, g, or t
  misc_feature (151)..(165): n is a, c, g, or t
  misc_feature (167)..(187): n is a, c, g, or t
  misc_feature (190)..(247): n is a, c, g, or t
  misc_feature (275)..(347): n is a, c, g, or t
cgaaagacggaacgccgccgcgctccgggactacagcctgttgctggacttcgagactgnnnnnnnnnnnnnnnnnnnnnnnnnnnnnnnnnnnnnnnnnnnnnnnnagttccctatnnnnnnnnnnnnnnnnnnnnnnntctgcgcgggnnnnnnnnnnnnnnntnnnnnnnnnnnnnnnnnnnnnacnnnnnnnnnnnnnnnnnnnnnnnnnnnnnnnnnnnnnnnnnnnnnnnnnnnnnnnnnnccgcgtggagatcatagccaacgatcannnnnnnnnnnnnnnnnnnnnnnnnnnnnnnnnnnnnnnnnnnnnnnnnnnnnnnnnnnnnnnnnnnnnnnnntaaccagctcacctccaatcccgagaacacggatttcgacgccc

SEQ ID NO: 4832 - DNA, 284 bp, Cricetulus griseus; identical to SEQ ID NO: 1190
  misc_feature (34)..(62): n is a, c, g, or t

SEQ ID NO: 4833 - DNA, 579 bp, Cricetulus griseus; identical to SEQ ID NO: 1191

SEQ ID NO: 4834 - DNA, 581 bp, Cricetulus griseus; identical to SEQ ID NO: 1192

SEQ ID NO: 4835 - DNA, 514 bp, Cricetulus griseus; identical to SEQ ID NO: 1193
  misc_feature (268)..(289): n is a, c, g, or t
  misc_feature (378)..(417): n is a, c, g, or t

SEQ ID NO: 4836 - DNA, 580 bp, Cricetulus griseus; identical to SEQ ID NO: 1194
  misc_feature (319)..(338): n is a, c, g, or t

SEQ ID NO: 4837 - DNA, 509 bp, Cricetulus griseus
gaagaaataaatatggcattgaggctgagacctaaaggataagttgggatgggtggaataacactccagaacaaagactgtatttttaaaggtagtgaggagaaaagttatgttcatgcaacaaacataaaaggccagtatattttattgtaaatgtagtgggaagctgttgaagggttctgtgcgacagagtatatgacctattttatttgaacatctttgctggccagagaatgtgttctaaggtgtgactggaaacaaaataaaccatcctgagtgaggtgaactgttgttccaacttagagattataaggatttgtgcataacagatcagatgtgagagaggctgactcccagggtttgacttcagtaattgaatagtggggttctgctccctgacttgggaaagattgaaagtagaatggatttggagtgatgaatagaattctagttgtatttgtttgtaagggtaccttattctacaagtcatggagtgtggcaaaaaggta

SEQ ID NO: 4838 - DNA, 481 bp, Cricetulus griseus; identical to SEQ ID NO: 1196
  misc_feature (97)..(97): n is a, c, g, or t

SEQ ID NO: 4839 - DNA, 579 bp, Cricetulus griseus; identical to SEQ ID NO: 1197
  misc_feature (63)..(81): n is a, c, g, or t

SEQ ID NO: 4840 - DNA, 579 bp, Cricetulus griseus; identical to SEQ ID NO: 1198

SEQ ID NO: 4841 - DNA, 578 bp, Cricetulus griseus; identical to SEQ ID NO: 1199

SEQ ID NO: 4842 - DNA, 352 bp, Cricetulus griseus; identical to SEQ ID NO: 1200
  misc_feature (241)..(279): n is a, c, g, or t

SEQ ID NO: 4843 - DNA, 360 bp, Cricetulus griseus; identical to SEQ ID NO: 1201

SEQ ID NO: 4844 - DNA, 580 bp, Cricetulus griseus; identical to SEQ ID NO: 1202

SEQ ID NO: 4845 - DNA, 580 bp, Cricetulus griseus; identical to SEQ ID NO: 1203

SEQ ID NO: 4846 - DNA, 466 bp, Cricetulus griseus; identical to SEQ ID NO: 1204
  misc_feature (241)..(294): n is a, c, g, or t

SEQ ID NO: 4847 - DNA, 580 bp, Cricetulus griseus; identical to SEQ ID NO: 1205
  misc_feature (539)..(555): n is a, c, g, or t

SEQ ID NO: 4848 - DNA, 366 bp, Cricetulus griseus; identical to SEQ ID NO: 1206

SEQ ID NO: 4849 - DNA, 551 bp, Cricetulus griseus; identical to SEQ ID NO: 1207

SEQ ID NO: 4850 - DNA, 580 bp, Cricetulus griseus; identical to SEQ ID NO: 1208

SEQ ID NO: 4851 - DNA, 579 bp, Cricetulus griseus; identical to SEQ ID NO: 1209

SEQ ID NO: 4852 - DNA, 568 bp, Cricetulus griseus; identical to SEQ ID NO: 1210

SEQ ID NO: 4853 - DNA, 505 bp, Cricetulus griseus; identical to SEQ ID NO: 1211

SEQ ID NO: 4854 - DNA, 579 bp, Cricetulus griseus; identical to SEQ ID NO: 1212

SEQ ID NO: 4855 - DNA, 578 bp, Cricetulus griseus; identical to SEQ ID NO: 1213

SEQ ID NO: 4856 - DNA, 416 bp, Cricetulus griseus; identical to SEQ ID NO: 1214
  misc_feature (155)..(178): n is a, c, g, or t
  misc_feature (306)..(318): n is a, c, g, or t
  misc_feature (320)..(341): n is a, c, g, or t

SEQ ID NO: 4857 - DNA, 578 bp, Cricetulus griseus; identical to SEQ ID NO: 1215

SEQ ID NO: 4858 - DNA, 524 bp, Cricetulus griseus; identical to SEQ ID NO: 1216

SEQ ID NO: 4859 - DNA, 580 bp, Cricetulus griseus; identical to SEQ ID NO: 1217

SEQ ID NO: 4860 - DNA, 578 bp, Cricetulus griseus; identical to SEQ ID NO: 1218
  misc_feature (448)..(467): n is a, c, g, or t

SEQ ID NO: 4861 - DNA, 547 bp, Cricetulus griseus; identical to SEQ ID NO: 1219

SEQ ID NO: 4862 - DNA, 567 bp, Cricetulus griseus; identical to SEQ ID NO: 1220
  misc_feature (357)..(392): n is a, c, g, or t

SEQ ID NO: 4863 - DNA, 580 bp, Cricetulus griseus; identical to SEQ ID NO: 1221
  misc_feature (272)..(290): n is a, c, g, or t

SEQ ID NO: 4864 - DNA, 271 bp, Cricetulus griseus; identical to SEQ ID NO: 1222

SEQ ID NO: 4865 - DNA, 579 bp, Cricetulus griseus; identical to SEQ ID NO: 1223

SEQ ID NO: 4866 - DNA, 187 bp, Cricetulus griseus; identical to SEQ ID NO: 1224

SEQ ID NO: 4867 - DNA, 577 bp, Cricetulus griseus
gcattcaagacccaggctaaggaacctggaacatacacgctgcgacagctacgggtcacactgggcccggtgtggtttgtccttgcacacatccaccccattgtacagtacgatgtgtactctcaggaacctcagctgcacgtggagccgctggctgatagccttttggctggcattcctcagaaagtcaagtttactgtcactactgggcattatacagtaaagaacggagacagcctccagctcagcaatgttgaagccatgctcatcttgtgtcaggcagagaacagggccgtggtctactctaactcaagagaagagtgttccactgcctcgctccggatccagtcctccgacaaggtcacgagtatcagtcttccctctgcacctgcataccatgtgatcgagtttgagctggaggttctgtctttaccttcagctccagcagttggtgaggatagcagtattctggggacaccagagccctacaggaagcagaaagacatgcagcaaactgactattgcatggtcaccacagatcacaaagtgtccattgattgcccgtggtctatctact

SEQ ID NO: 4868 - DNA, 457 bp, Cricetulus griseus; identical to SEQ ID NO: 1226
  misc_feature (71)..(86): n is a, c, g, or t

SEQ ID NO: 4869 - DNA, 580 bp, Cricetulus griseus; identical to SEQ ID NO: 1227

SEQ ID NO: 4870 - DNA, 580 bp, Cricetulus griseus; identical to SEQ ID NO: 1228

SEQ ID NO: 4871 - DNA, 579 bp, Cricetulus griseus; identical to SEQ ID NO: 1229

SEQ ID NO: 4872 - DNA, 579 bp, Cricetulus griseus; identical to SEQ ID NO: 1230

SEQ ID NO: 4873 - DNA, 568 bp, Cricetulus griseus; identical to SEQ ID NO: 1231
  misc_feature (373)..(373): n is a, c, g, or t

SEQ ID NO: 4874 - DNA, 579 bp, Cricetulus griseus; identical to SEQ ID NO: 1232
  misc_feature (160)..(182): n is a, c, g, or t
  misc_feature (249)..(269): n is a, c, g, or t

SEQ ID NO: 4875 - DNA, 579 bp, Cricetulus griseus; identical to SEQ ID NO: 1233
  misc_feature (320)..(335): n is a, c, g, or t
  misc_feature (425)..(458): n is a, c, g, or t

SEQ ID NO: 4876 - DNA, 581 bp, Cricetulus griseus; identical to SEQ ID NO: 1234
  misc_feature (535)..(535): n is a, c, g, or t

SEQ ID NO: 4877 - DNA, 567 bp, Cricetulus griseus; identical to SEQ ID NO: 1235

SEQ ID NO: 4878 - DNA, 567 bp, Cricetulus griseus; identical to SEQ ID NO: 1236

SEQ ID NO: 4879 - DNA, 578 bp, Cricetulus griseus; identical to SEQ ID NO: 1237

SEQ ID NO: 4880 - DNA, 580 bp, Cricetulus griseus; identical to SEQ ID NO: 1238

SEQ ID NO: 4881 - DNA, 579 bp, Cricetulus griseus; identical to SEQ ID NO: 1239

SEQ ID NO: 4882 - DNA, 177 bp, Cricetulus griseus
aactaactactcttccatctaagagatgcttagcacagattttcctaagaaaaatgggattttttttcctagtaagttatttgattagttactgtaaagaaatatagggaactgtgcttccttggattagacattgaaatggaaaatactgtgggaattttgatattcttgaaaaaa

SEQ ID NO: 4883 - DNA, 579 bp, Cricetulus griseus; identical to SEQ ID NO: 1241

SEQ ID NO: 4884 - DNA, 578 bp, Cricetulus griseus; identical to SEQ ID NO: 1242

SEQ ID NO: 4885 - DNA, 578 bp, Cricetulus griseus; identical to SEQ ID NO: 1243
  misc_feature (480)..(496): n is a, c, g, or t

SEQ ID NO: 4886 - DNA, 123 bp, Cricetulus griseus; identical to SEQ ID NO: 1244

SEQ ID NO: 4887 - DNA, 567 bp, Cricetulus griseus; identical to SEQ ID NO: 1245

SEQ ID NO: 4888 - DNA, 569 bp, Cricetulus griseus
agacctgccgcatgttttccctgcctaccatccgggggcactagttgctaggagaattgacacactgagacatgaatgctgctaacacatttctggctgatctgcgcaacgctgacatctatgtgtcggatgctgaggaggaggatgagacttctctggaaagtgacctggattcagaagagctggcaggagtcaggacacattccagtcagaaggacaggaagtgcttgcagtctgctcaagtggatgacactaaagaggaagaaggagagaatccattgctggtaccactagaagaaaaggcagtgctgcaggaagagcaagctaacctgtggttctccaaggacggcttcagtgggattgaggatgatgctgatgaggccctggagatcagtcaggcaaagctgctgctcaagagtcgtcagaaggagccatctacaccacctagtagtctgaagactgaacagaaacaccccccgtgccagaatgaggtccctaaggagacagaggctgtctcatggacagaagctgtcattgaccctatgggggaggacaaagtcaacagctca

SEQ ID NO: 4889 - DNA, 578 bp, Cricetulus griseus; identical to SEQ ID NO: 1247
  misc_feature (30)..(48): n is a, c, g, or t

SEQ ID NO: 4890 - DNA, 579 bp, Cricetulus griseus; identical to SEQ ID NO: 1248

SEQ ID NO: 4891 - DNA, 578 bp, Cricetulus griseus; identical to SEQ ID NO: 1249
  misc_feature (296)..(327): n is a, c, g, or t
  misc_feature (432)..(451): n is a, c, g, or t
  misc_feature (456)..(456): n is a, c, g, or t

SEQ ID NO: 4892 - DNA, 579 bp, Cricetulus griseus; identical to SEQ ID NO: 1250
  misc_feature (479)..(497): n is a, c, g, or t

SEQ ID NO: 4893 - DNA, 580 bp, Cricetulus griseus; identical to SEQ ID NO: 1251

SEQ ID NO: 4894 - DNA, 418 bp, Cricetulus griseus; identical to SEQ ID NO: 1252

SEQ ID NO: 4895 - DNA, 578 bp, Cricetulus griseus; identical to SEQ ID NO: 1253

SEQ ID NO: 4896 - DNA, 194 bp, Cricetulus griseus; identical to SEQ ID NO: 1254

SEQ ID NO: 4897 - DNA, 389 bp, Cricetulus griseus; identical to SEQ ID NO: 1255

SEQ ID NO: 4898 - DNA, 569 bp, Cricetulus griseus; identical to SEQ ID NO: 1256
  misc_feature (464)..(484): n is a, c, g, or t

SEQ ID NO: 4899 - DNA, 569 bp, Cricetulus griseus; identical to SEQ ID NO: 1257

SEQ ID NO: 4900 - DNA, 578 bp, Cricetulus griseus; identical to SEQ ID NO: 1258
  misc_feature (249)..(263): n is a, c, g, or t

SEQ ID NO: 4901 - DNA, 361 bp, Cricetulus griseus; identical to SEQ ID NO: 1259

SEQ ID NO: 4902 - DNA, 568 bp, Cricetulus griseus; identical to SEQ ID NO: 1260
  misc_feature (192)..(208): n is a, c, g, or t
  misc_feature (448)..(448): n is a, c, g, or t

SEQ ID NO: 4903 - DNA, 578 bp, Cricetulus griseus; identical to SEQ ID NO: 1261
  misc_feature (468)..(485): n is a, c, g, or t

SEQ ID NO: 4904 - DNA, 580 bp, Cricetulus griseus; identical to SEQ ID NO: 1262

SEQ ID NO: 4905 - DNA, 580 bp, Cricetulus griseus
gcaccccatagcatgtgtgcacccaaactcccatcacgtgtgtgtgcgcccacattttcggacatacttaattaattaccgaatagtacaaaacagaacaaaaagcgctttggcactatctgtaatgaatgtattttttaaaaacatgagtgtatctttaaaaaatataatacatgtaaaatattttactgattcaggtagaaatattttatagttatctaaaatagtaaagttactgtgcccatcttgttataaagtggtgttaactgaggatggcggcacctgactataaccctagcattcatgaggcagagggggagccatgggagttggaggccagccagggctgctagtgagactgcattgagcagaacagctatcccagttaattttaacagcttgttttgaatgtagtacagtattgtctgttgaagatagcatccaaagtaagtttaaaccaaggatttaagtatacccttatttaagacttaaaaatgtttgtttctaattattcttacccctttaggaaaggatatcccccttataaatgttgtagttctgattttattagatccccccc

SEQ ID NO: 4906 - DNA, 579 bp, Cricetulus griseus; identical to SEQ ID NO: 1264

SEQ ID NO: 4907 - DNA, 578 bp, Cricetulus griseus; identical to SEQ ID NO: 1265

SEQ ID NO: 4908 - DNA, 579 bp, Cricetulus griseus
ttttccctcagtcaggagcaggcctggcaggggtattcttcccagctcccttggcaggcttcccttttctgaggaaagtggcttgattcccctgactccttgccagctgctgatccctacatggccaggacagccacagtgcatgggacagctgtatttcctagggtagcagtgaccaagtctggagactcttttgtccaattaggcccagcttgggtctctgtcactcctacgaattccttctggggtgctgtcttaatttgccttttgtcacagggtgactcttggcaatggcagttagcagttacagattcttacactccagtgggcttcccttagatggtggagctaggttccttttcttgtcttggggccctgcctgtcaccccactgtctttctgggggccaaggctgtttttttctctcctggacacccttgtgttgtaattatgtacagaaggtcaggttggcctgggtggggtgctctgttctgtgtttcacagtgctcctgtactccagtttatttaaggggacatgcaaggaaatgccctccatttccttcccatatatgtcctgctc

SEQ ID NO: 4909 - DNA, 487 bp, Cricetulus griseus; identical to SEQ ID NO: 1267

SEQ ID NO: 4910 - DNA, 542 bp, Cricetulus griseus; identical to SEQ ID NO: 1268

SEQ ID NO: 4911 - DNA, 544 bp, Cricetulus griseus; identical to SEQ ID NO: 1269
  misc_feature (325)..(343): n is a, c, g, or t

SEQ ID NO: 4912 - DNA, 557 bp, Cricetulus griseus; identical to SEQ ID NO: 1270
  misc_feature (266)..(291): n is a, c, g, or t

SEQ ID NO: 4913 - DNA, 567 bp, Cricetulus griseus; identical to SEQ ID NO: 1271

SEQ ID NO: 4914 - DNA, 483 bp, Cricetulus griseus; identical to SEQ ID NO: 1272

SEQ ID NO: 4915 - DNA, 578 bp, Cricetulus griseus; identical to SEQ ID NO: 1273

SEQ ID NO: 4916 - DNA, 151 bp, Cricetulus griseus; identical to SEQ ID NO: 1274

SEQ ID NO: 4917 - DNA, 240 bp, Cricetulus griseus; identical to SEQ ID NO: 1275

SEQ ID NO: 4918 - DNA, 579 bp, Cricetulus griseus; identical to SEQ ID NO: 1276

SEQ ID NO: 4919 - DNA, 430 bp, Cricetulus griseus; identical to SEQ ID NO: 1277

SEQ ID NO: 4920 - DNA, 314 bp, Cricetulus griseus; identical to SEQ ID NO: 1278

SEQ ID NO: 4921 - DNA, 567 bp, Cricetulus griseus; identical to SEQ ID NO: 1279

SEQ ID NO: 4922 - DNA, 485 bp, Cricetulus griseus; identical to SEQ ID NO: 1280
  misc_feature (151)..(165): n is a, c, g, or t

SEQ ID NO: 4923 - DNA, 481 bp, Cricetulus griseus; identical to SEQ ID NO: 1281
  misc_feature (75)..(75): n is a, c, g, or t

SEQ ID NO: 4924 - DNA, 131 bp, Cricetulus griseus; identical to SEQ ID NO: 1282

SEQ ID NO: 4925 - DNA, 530 bp, Cricetulus griseus; identical to SEQ ID NO: 1283

SEQ ID NO: 4926 - DNA, 490 bp, Cricetulus griseus; identical to SEQ ID NO: 1284
  misc_feature (29)..(59): n is a, c, g, or t

SEQ ID NO: 4927 - DNA, 121 bp, Cricetulus griseus
  misc_feature (40)..(81): n is a, c, g, or t
tctggggcccgagaagacctctttcttccaagctttgggnnnnnnnnnnnnnnnnnnnnnnnnnnnnnnnnnnnnnnnnnntgatgtgcagctgataaaaactggagacatagtaggagcc

SEQ ID NO: 4928 - DNA, 580 bp, Cricetulus griseus; identical to SEQ ID NO: 1286
  misc_feature (343)..(361): n is a, c, g, or t

SEQ ID NO: 4929 - DNA, 580 bp, Cricetulus griseus; identical to SEQ ID NO: 1287

SEQ ID NO: 4930 - DNA, 515 bp, Cricetulus griseus; identical to SEQ ID NO: 1288

SEQ ID NO: 4931 - DNA, 544 bp, Cricetulus griseus; identical to SEQ ID NO: 1289

SEQ ID NO: 4932 - DNA, 499 bp, Cricetulus griseus; identical to SEQ ID NO: 1290

SEQ ID NO: 4933 - DNA, 579 bp, Cricetulus griseus; identical to SEQ ID NO: 1291
  misc_feature (48)..(48): n is a, c, g, or t

SEQ ID NO: 4934 - DNA, 437 bp, Cricetulus griseus; identical to SEQ ID NO: 1292

SEQ ID NO: 4935 - DNA, 518 bp, Cricetulus griseus; identical to SEQ ID NO: 1293

SEQ ID NO: 4936 - DNA, 503 bp, Cricetulus griseus
  misc_feature (240)..(254): n is a, c, g, or t
  misc_feature (312)..(343): n is a, c, g, or t
  misc_feature (355)..(373): n is a, c, g, or t
  misc_feature (389)..(406): n is a, c, g, or t
tggggttcaaggaacgacagtatcatgaagccagaaaaagtgctccattacgattctttataaggcaggcggtttggttgacaggtgcgaggagtatcacctttgacctttggtgtcaagggttcccctttgagcagcaatgaatgatgaccggagctagaacagggctcggggcaggccagcgcaccaggactgcagaggttttggacaaccagatcctgatcacctactggacttctnnnnnnnnnnnnnnnaaagcaactttctagccatccatttaggaggctttttgtgtttgtttttacttttcannnnnnnnnnnnnnnnnnnnnnnnnnnnnnnnggcactcgctcnnnnnnnnnnnnnnnnnnnaaactcacagagatcnnnnnnnnnnnnnnnnnntagtgctgggatcaaaggcgtgtgccaccaacgcccggctcatttaggaggctattaattgagctactgatttccatacttgttcttccaaaaggca

SEQ ID NO: 4937 - DNA, 582 bp, Cricetulus griseus; identical to SEQ ID NO: 1295
  misc_feature (528)..(528): n is a, c, g, or t

SEQ ID NO: 4938 - DNA, 475 bp, Cricetulus griseus; identical to SEQ ID NO: 1296

SEQ ID NO: 4939 - DNA, 176 bp, Cricetulus griseus; identical to SEQ ID NO: 1297

SEQ ID NO: 4940 - DNA, 474 bp, Cricetulus griseus; identical to SEQ ID NO: 1298

SEQ ID NO: 4941 - DNA, 579 bp, Cricetulus griseus; identical to SEQ ID NO: 1299

SEQ ID NO: 4942 - DNA, 479 bp, Cricetulus griseus; identical to SEQ ID NO: 1300
  misc_feature (327)..(344): n is a, c, g, or t

SEQ ID NO: 4943 - DNA, 534 bp, Cricetulus griseus; identical to SEQ ID NO: 1301

SEQ ID NO: 4944 - DNA, 508 bp, Cricetulus griseus; identical to SEQ ID NO: 1302

SEQ ID NO: 4945 - DNA, 499 bp, Cricetulus griseus; identical to SEQ ID NO: 1303

SEQ ID NO: 4946 - DNA, 527 bp, Cricetulus griseus; identical to SEQ ID NO: 1304

SEQ ID NO: 4947 - DNA, 580 bp, Cricetulus griseus; identical to SEQ ID NO: 1305

SEQ ID NO: 4948 - DNA, 436 bp, Cricetulus griseus; identical to SEQ ID NO: 1306

SEQ ID NO: 4949 - DNA, 560 bp, Cricetulus griseus
agtcagcttttaatagcatatcggcggagagagagaagctgaagcagctgatggagctggaggtctcctcttctccttctgctcaggtcgtcggtctgaagcatgccctgtcatctgaaaactccggggatgaaagccgagccctggtgcaccagctctccaacgagagcaggctgtctatcacggactccctttctgagttttttgatgcccaggaagttctgctatctcctagctcttcagaaaatgagatttctgatgacgattcatatgtcagtgacataagtgacaatctgtccttagacaacctcagtaatgatttagacaatgaaagacagaccttatggcctgttctggagagtggtggggaagccaggtccaaaaggcggacctgcttgcccgcacagggtcccaacaccagcagtgtcagcttgtggaccatcctgcggaacaacattgggaaggacctgtccaaggtggccatgcccgtggagctgaatgagcccctgaacacactgcagcggctctgtgaggagctggagtacagcgagcttctggac

SEQ ID NO: 4950 - DNA, 579 bp, Cricetulus griseus; identical to SEQ ID NO: 1308

SEQ ID NO: 4951 - DNA, 579 bp, Cricetulus griseus; identical to SEQ ID NO: 1309
  misc_feature (59)..(76): n is a, c, g, or t

SEQ ID NO: 4952 - DNA, 132 bp, Cricetulus griseus; identical to SEQ ID NO: 1310

SEQ ID NO: 4953 - DNA, 578 bp, Cricetulus griseus; identical to SEQ ID NO: 1311

SEQ ID NO: 4954 - DNA, 568 bp, Cricetulus griseus; identical to SEQ ID NO: 1312
  misc_feature (44)..(75): n is a, c, g, or t

SEQ ID NO: 4955 - DNA, 567 bp, Cricetulus griseus; identical to SEQ ID NO: 1313
  misc_feature (504)..(504): n is a, c, g, or t

SEQ ID NO: 4956 - DNA, 532 bp, Cricetulus griseus
catgacatgaacaaagttctggatctggaaatgaagggtgacatcgagaagtgcctcactgcccttgtgaaatgttccaccagcaccccagctttctttgctgagaaactttatgaagccatgaagggagctggaactcgccataaggcattgatcaggattatggtctcccgttctgaaatcgacatgaatgaaatcaaagcattttacctgaagaagtatggaatctctctttgccaagccatcctggatgaaaccaaaggagactatgaaaagatcttggtggctctgtgtgatggcaactagatgtccccgctgctcagaagcactgtgatgagagcatctcttagctgttgctttcctctatcacacaagcttaagtaagagggttgctttagcagataacaagctaattacccactttgaataatataacatatgaataagttttacatcatacctctgtacaatagagaaataattgttttattatgttttccccagattataaatccctataagcaagttactc

SEQ ID NO: 4957 - DNA, 580 bp, Cricetulus griseus; identical to SEQ ID NO: 1315
  misc_feature (433)..(451): n is a, c, g, or t
  misc_feature (504)..(532): n is a, c, g, or t

SEQ ID NO: 4958 - DNA, 580 bp, Cricetulus griseus
  misc_feature (49)..(77): n is a, c, g, or t
  misc_feature (130)..(148): n is a, c, g, or t
ggtgatgctgtttaatgtttactatgtgtcagacccaatatgagtagtnnnnnnnnnnnnnnnnnnnnnnnnnnnnnattctctgtattgttttggaggctgtcctggaactccctctgtagaccagggnnnnnnnnnnnnnnnnnnngtctgctgcctctgcctcccatgtgctggttttaaaggcatgcgccaccaatgcccggctcagtatgagtattttatacatattagaatattaaaataaaaatctacaattttgctattagttttacaatttgcaggttagaaaactgaaaaacataatagttaaggaatttttctggatgttgtggagttagtaagtagaaaagctagattttaaacttaggtaggacacctttaaccagcatatttttaggaatcatattgcctcctgaacaagatggtacctatgaaatgatggagaaaacaataggaactgaaggaaaatagtattgtggtgcccatttacagcctacacagtatttgctatccatcatctccttgagtccttaaagagcgggtattgctccctcccactctatatcctttctcatct

SEQ ID NO: 4959 - DNA, 579 bp, Cricetulus griseus; identical to SEQ ID NO: 1317

SEQ ID NO: 4960 - DNA, 494 bp, Cricetulus griseus; identical to SEQ ID NO: 1318
  misc_feature (65)..(82): n is a, c, g, or t

SEQ ID NO: 4961 - DNA, 579 bp, Cricetulus griseus; identical to SEQ ID NO: 1319

SEQ ID NO: 4962 - DNA, 379 bp, Cricetulus griseus; identical to SEQ ID NO: 1320

SEQ ID NO: 4963 - DNA, 579 bp, Cricetulus griseus; identical to SEQ ID NO: 1321

SEQ ID NO: 4964 - DNA, 448 bp, Cricetulus griseus; identical to SEQ ID NO: 1322

SEQ ID NO: 4965 - DNA, 299 bp, Cricetulus griseus; identical to SEQ ID NO: 1323

SEQ ID NO: 4966 - DNA, 504 bp, Cricetulus griseus
  misc_feature (298)..(331): n is a, c, g, or t
aaaagacaatagatgagccccccatatccgctgacttgctggaacattgcagtttctctcaagtggtgtttaacagtgtggagaagttctatattcctggaggagatgtcatgtgctattacaccttcacccaacagttcgtccctcgtcgcaaggactggattggcatctttaaagtggggtggaagacaacccgagagtattataccttcatgtgggttgctttgcccagtgacctaaacaaggaatcaaccaagcagcaagaagtccagttcaaagcctactatctgcccaaggnnnnnnnnnnnnnnnnnnnnnnnnnnnnnnnnnnaggtggtgtggtccggggagcaagtatccccttccagttccgtccagaaactgaggaggacatagtggttgttaccactaagggaaaggtggaagagatagagcaacacattaacgagcttctacgggaaaaccacgagctgaaagacagctgtgccagcctccagaatcata

SEQ ID NO: 4967 - DNA, 570 bp, Cricetulus griseus; identical to SEQ ID NO: 1325

SEQ ID NO: 4968 - DNA, 579 bp, Cricetulus griseus; identical to SEQ ID NO: 1326
  misc_feature (331)..(348): n is a, c, g, or t

SEQ ID NO: 4969 - DNA, 580 bp, Cricetulus griseus; identical to SEQ ID NO: 1327

SEQ ID NO: 4970 - DNA, 580 bp, Cricetulus griseus; identical to SEQ ID NO: 1328

SEQ ID NO: 4971 - DNA, 577 bp, Cricetulus griseus
  misc_feature (441)..(441): n is a, c, g, or t
tgcagtggctccagagcccgggcgggcgatctgcggctgccgcacggcactgtggccaccccggtgttcatgcctgtggggacacaggccaccatgaagggcatcacggcggagcagctgcacggcctgggttgccgcctctgcctgggcaacacctaccacctggggctgaggccgggcccggagctgatccagaaggcccgcggcctccacggcttcatggactggccgcacaacctcctcacggacagtggcggcttccagatggtgtccctgttctccctgtccgaggtgacggaagagggcgtccgcttccgctcgccctacgacggccaagagatgctgttgagcccggagaggtccgtgcagatccagaacgccctgggctctgacatcatcatgcagttggatgacgtggtgagcagcacagtgacaggcccncgagtggaggaggccatgcacaggtcagtccgctggctagacaggtgcattgcagcccatcagcgtgaggacaagcagaacctctttgccatcatccagggtggactgaatgccgatctgcggaccacttgcctga

SEQ ID NO: 4972 - DNA, 579 bp, Cricetulus griseus; identical to SEQ ID NO: 1330
  misc_feature (171)..(188): n is a, c, g, or t

SEQ ID NO: 4973 - DNA, 211 bp, Cricetulus griseus; identical to SEQ ID NO: 1331

SEQ ID NO: 4974 - DNA, 578 bp, Cricetulus griseus
agatcatagggctgagccgcaggattgctgatgaaaatgggaaacctcggcctgctttctccaatgatctggagcctgactttaaggcagtgagtattgctgtgacaggcgctggcagttgtcggcacttacaatttatccctgtggcaccaccgtctcctggaacctcagcagcaccagccacagaggttccagacagggaccttgagaagagcagtgaggatgatgtttatctgcacacagtcattccagctgttgtggttgcagccatcctgctcattgctggaatcattgctatgatctgctatcgcaagaagcggaagggcaagctgacccttgaggaccaggccacctttatcaagaagggggtgcctatcatctttgcagatgagctggatgactccaagcccccaccctcttctagcatgccactcatcttgcaggaagagaaggctcctctcccacctcctgagtaccccaaccagagtgtgcccgagaccacgcctctgaaccaggacactgtaggagagtacacgcctctgcgggatgaggatcctaatgcacctccctaccagcca

SEQ ID NO: 4975 - DNA, 578 bp, Cricetulus griseus; identical to SEQ ID NO: 1333

SEQ ID NO: 4976 - DNA, 578 bp, Cricetulus griseus; identical to SEQ ID NO: 1334

SEQ ID NO: 4977 - DNA, 579 bp, Cricetulus griseus; identical to SEQ ID NO: 1335
  misc_feature (537)..(537): n is a, c, g, or t

SEQ ID NO: 4978 - DNA, 338 bp, Cricetulus griseus; identical to SEQ ID NO: 1336

SEQ ID NO: 4979 - DNA, 579 bp, Cricetulus griseus; identical to SEQ ID NO: 1337

SEQ ID NO: 4980 - DNA, 498 bp, Cricetulus griseus; identical to SEQ ID NO: 1338

SEQ ID NO: 4981 - DNA, 578 bp, Cricetulus griseus; identical to SEQ ID NO: 1339

SEQ ID NO: 4982 - DNA, 509 bp, Cricetulus griseus; identical to SEQ ID NO: 1340
  misc_feature (300)..(319): n is a, c, g, or t

SEQ ID NO: 4983 - DNA, 579 bp, Cricetulus griseus; identical to SEQ ID NO: 1341

SEQ ID NO: 4984 - DNA, 579 bp, Cricetulus griseus; identical to SEQ ID NO: 1342
  misc_feature (510)..(552): n is a, c, g, or t

SEQ ID NO: 4985 - DNA, 550 bp, Cricetulus griseus
ccctacccccagggactcacttactctttgcccagactgggaagattgaacgcctccctctggagggaaacaccatgaagaagacagaagccaaggcctttttccatatccctgcaaaagtcatcattggactggcctttgactgtgtggacaaggtggtttactggacagacatcagtgagccttccattgggagagccagcctacatggtggagagccaaccaccatcattcgacaagatcttggaagccctgaaggcattgcccttgaccatctcggccgcaacatcttctggacagactctcagctagatcggatagaagttgcaagaatggatggcacacagcgaagagtgctgtttgacacgggtttggtgaaccccagaggcattgtgacagactccgtaggagggaacctttattggacagattggaacagagaaaatcccaaaattgaaacttcttacatggatggcaccaaccggaggattctcgcacaggacaacttgggcctgcctaatggcctgacctttgatgcattctcgtctca

SEQ ID NO: 4986 - DNA, 511 bp, Cricetulus griseus; identical to SEQ ID NO: 1344

SEQ ID NO: 4987 - DNA, 507 bp, Cricetulus griseus; identical to SEQ ID NO: 1345

SEQ ID NO: 4988 - DNA, 178 bp, Cricetulus griseus; identical to SEQ ID NO: 1346

SEQ ID NO: 4989 - DNA, 128 bp, Cricetulus griseus; identical to SEQ ID NO: 1347

SEQ ID NO: 4990 - DNA, 466 bp, Cricetulus griseus; identical to SEQ ID NO: 1348
  misc_feature (35)..(56): n is a, c, g, or t
  misc_feature (137)..(187): n is a, c, g, or t

SEQ ID NO: 4991 - DNA, 579 bp, Cricetulus griseus; identical to SEQ ID NO: 1349

SEQ ID NO: 4992 - DNA, 289 bp, Cricetulus griseus
aatcacccaggcataaggctgttgagttttctgcaggggccgagtctccctccaaaaggtggtgggcagacgcccaaaagtcccccagtacggtatgtccaggagactccacttgtattcagcagatgtgtatgtgtcagctccctctgccagttttgagagtcgttccattgccagatctgttcagagtgagccctgcagtggaatggtgagtggcattataagccccagcgatcttccagatagccctgggcagaccatgccaccaagcagaagcaaaacccctcca

SEQ ID NO: 4993 - DNA, 497 bp, Cricetulus griseus; identical to SEQ ID NO: 1351

SEQ ID NO: 4994 - DNA, 579 bp, Cricetulus griseus; identical to SEQ ID NO: 1352

SEQ ID NO: 4995 - DNA, 455 bp, Cricetulus griseus; identical to SEQ ID NO: 1353

SEQ ID NO: 4996 - DNA, 578 bp, Cricetulus griseus; identical to SEQ ID NO: 1354
  misc_feature (296)..(296): n is a, c, g, or t
  misc_feature (542)..(542): n is a, c, g, or t

SEQ ID NO: 4997 - DNA, 579 bp, Cricetulus griseus; identical to SEQ ID NO: 1355

SEQ ID NO: 4998 - DNA, 554 bp, Cricetulus griseus; identical to SEQ ID NO: 1356
  misc_feature (378)..(393): n is a, c, g, or t

SEQ ID NO: 4999 - DNA, 411 bp, Cricetulus griseus; identical to SEQ ID NO: 1357

SEQ ID NO: 5000 - DNA, 231 bp, Cricetulus griseus; identical to SEQ ID NO: 1358

SEQ ID NO: 5001 - DNA, 579 bp, Cricetulus griseus; identical to SEQ ID NO: 1359

SEQ ID NO: 5002 - DNA, 444 bp, Cricetulus griseus; identical to SEQ ID NO: 1360

SEQ ID NO: 5003 - DNA, 579 bp, Cricetulus griseus; identical to SEQ ID NO: 1361

SEQ ID NO: 5004 - DNA, 380 bp, Cricetulus griseus; identical to SEQ ID NO: 1362

SEQ ID NO: 5005 - DNA, 578 bp, Cricetulus griseus; identical to SEQ ID NO: 1363

SEQ ID NO: 5006 - DNA, 505 bp, Cricetulus griseus; identical to SEQ ID NO: 1364

SEQ ID NO: 5007 - DNA, 578 bp, Cricetulus griseus; identical to SEQ ID NO: 1365
  misc_feature (222)..(245): n is a, c, g, or t

SEQ ID NO: 5008 - DNA, 153 bp, Cricetulus griseus; identical to SEQ ID NO: 1366
  misc_feature (81)..(102): n is a, c, g, or t

SEQ ID NO: 5009 - DNA, 131 bp, Cricetulus griseus; identical to SEQ ID NO: 1367

SEQ ID NO: 5010 - DNA, 578 bp, Cricetulus griseus; identical to SEQ ID NO: 1368

SEQ ID NO: 5011 - DNA, 418 bp, Cricetulus griseus; identical to SEQ ID NO: 1369

SEQ ID NO: 5012 - DNA, 579 bp, Cricetulus griseus; identical to SEQ ID NO: 1370

SEQ ID NO: 5013 - DNA, 579 bp, Cricetulus griseus; identical to SEQ ID NO: 1371

SEQ ID NO: 5014 - DNA, 579 bp, Cricetulus griseus; identical to SEQ ID NO: 1372

SEQ ID NO: 5015 - DNA, 466 bp, Cricetulus griseus; identical to SEQ ID NO: 1373
  misc_feature (92)..(119): n is a, c, g, or t

SEQ ID NO: 5016 - DNA, 539 bp, Cricetulus griseus; identical to SEQ ID NO: 1374
  misc_feature (170)..(170): n is a, c, g, or t

SEQ ID NO: 5017 - DNA, 577 bp, Cricetulus griseus; identical to SEQ ID NO: 1375

SEQ ID NO: 5018 - DNA, 579 bp, Cricetulus griseus; identical to SEQ ID NO: 1376
  misc_feature (62)..(77): n is a, c, g, or t
  misc_feature (526)..(526): n is a, c, g, or t

SEQ ID NO: 5019 - DNA, 290 bp, Cricetulus griseus; identical to SEQ ID NO: 1377
  misc_feature (102)..(116): n is a, c, g, or t

SEQ ID NO: 5020 - DNA, 544 bp, Cricetulus griseus; identical to SEQ ID NO: 1378
  misc_feature (308)..(325): n is a, c, g, or t

SEQ ID NO: 5021 - DNA, 229 bp, Cricetulus griseus; identical to SEQ ID NO: 1379
  misc_feature (147)..(147): n is a, c, g, or t

SEQ ID NO: 5022 - DNA, 579 bp, Cricetulus griseus; identical to SEQ ID NO: 1380

SEQ ID NO: 5023 - DNA, 427 bp, Cricetulus griseus; identical to SEQ ID NO: 1381
  misc_feature (49)..(68): n is a, c, g, or t

SEQ ID NO: 5024 - DNA, 580 bp, Cricetulus griseus; identical to SEQ ID NO: 1382

SEQ ID NO: 5025 - DNA, 579 bp, Cricetulus griseus; identical to SEQ ID NO: 1383
  misc_feature (192)..(282): n is a, c, g, or t
  misc_feature (470)..(470): n is a, c, g, or t
  misc_feature (551)..(551): n is a, c, g, or t

SEQ ID NO: 5026 - DNA, 293 bp, Cricetulus griseus; identical to SEQ ID NO: 1384

SEQ ID NO: 5027 - DNA, 559 bp, Cricetulus griseus
acattgtatcttttctttttaatttcagttttactaaagtgttttatatatgttaaaattcatacacctaaatgtataatcgagtgaatttttgaagactatttactgttttgtatagcttttgccataaactacttttagaacattgtgattataacagtaagttccttcatactcattctgtttctaccacctgtagacagctatgaatccatgatctatagatttacctttcttgtacattttatgtaagtttcaaggctcattcatgtatatgtttctttgtaattgctggatagtgtctcatatactgttatgctgcatttttgttaattcattcagcatttgatggacatttagatcagttccaatttttggctattgtggattgtgttgctacaaacacatatatacaaatctttgcacattctaattttttattgggttagtgtttttagcttatcttttcaaacaaataaatattgcctacagggaaattcttaaagaagatgaaactggatcacttaaggctacgatagaggatattctttttaaggca

SEQ ID NO: 5028 - DNA, 546 bp, Cricetulus griseus; identical to SEQ ID NO: 1386
  misc_feature (353)..(383): n is a, c, g, or t

SEQ ID NO: 5029 - DNA, 383 bp, Cricetulus griseus
ggggcaagtccacacattgagaatttgctccatattcttagcttaatattaccattctttttaataacctcgtgcacagcttgtttcttcaacagaagacttgcagacttatagtccgctggctcaagtctagaatggaggctggccccccacaagtgcccaccgtatgtttctggaatgaatggatgcatcctccttgatgtgaagccataaagagacctttgctgtgaccttaacacagagatcatcatccactctggatatagactgtgcaggctccatgaatgggaaagggaccccacctcacataaaggacaatctgatttgctttgcctaaatgttgaactctgcgttgcgaatgcaagataaggatggggggaggt

SEQ ID NO: 5030 - DNA, 251 bp, Cricetulus griseus; identical to SEQ ID NO: 1388

SEQ ID NO: 5031 - DNA, 313 bp, Cricetulus griseus; identical to SEQ ID NO: 1389

SEQ ID NO: 5032 - DNA, 578 bp, Cricetulus griseus; identical to SEQ ID NO: 1390
  misc_feature (341)..(341): n is a, c, g, or t

SEQ ID NO: 5033 - DNA, 482 bp, Cricetulus griseus; identical to SEQ ID NO: 1391

SEQ ID NO: 5034 - DNA, 544 bp, Cricetulus griseus; identical to SEQ ID NO: 1392
  misc_feature (232)..(299): n is a, c, g, or t

SEQ ID NO: 5035 - DNA, 186 bp, Cricetulus griseus; identical to SEQ ID NO: 1393

SEQ ID NO: 5036 - DNA, 392 bp, Cricetulus griseus; identical to SEQ ID NO: 1394
  misc_feature (329)..(356): n is a, c, g, or t

SEQ ID NO: 5037 - DNA, 492 bp, Cricetulus griseus; identical to SEQ ID NO: 1395
  misc_feature (101)..(120): n is a, c, g, or t

SEQ ID NO: 5038 - DNA, 581 bp, Cricetulus griseus; identical to SEQ ID NO: 1396

SEQ ID NO: 5039 - DNA, 481 bp, Cricetulus griseus; identical to SEQ ID NO: 1397

SEQ ID NO: 5040 - DNA, 581 bp, Cricetulus griseus; identical to SEQ ID NO: 1398

SEQ ID NO: 5041 - DNA, 581 bp, Cricetulus griseus
acaccttgaccttgccattgtccccaccagtgacgatatactgcccatcaggagagtaggccagtgataccatgctgttgaagtggccctgttgcttgagtatataggattcactctgccattcccacaccagcagatggcccaggcgtgagcagccaaaggcgatccagtccccagagctgttgatggcaaccgaagcaaccctctgatcggagatactcagggagtggatgaggttgaactctgggagctcatgcagatggaagattccagaagcaaaacccgtgaccaaaagatgagtcttcttatgataggcagcggccgttaggttgttaaagtccccttctttattcaagaagtacttggccagccgtgagtacttcactttcccagccttctcctgttcagctggcatggtcttccctcggatagtggtccctcggtctccctcctcttcatcctccccctcctcctcctcttattcttccttctccctctgaagtaggtctgccttccagccttagggggtttcagcttcaggcctcagggggtgtatcacactgccacacacacagggctcc

SEQ ID NO: 5042 - DNA, 300 bp, Cricetulus griseus; identical to SEQ ID NO: 1400

SEQ ID NO: 5043 - DNA, 578 bp, Cricetulus griseus; identical to SEQ ID NO: 1401

SEQ ID NO: 5044 - DNA, 248 bp, Cricetulus griseus; identical to SEQ ID NO: 1402
  misc_feature (187)..(187): n is a, c, g, or t
  misc_feature (190)..(190): n is a, c, g, or t

SEQ ID NO: 5045 - DNA, 578 bp, Cricetulus griseus; identical to SEQ ID NO: 1403
  misc_feature (329)..(346): n is a, c, g, or t

SEQ ID NO: 5046 - DNA, 579 bp, Cricetulus griseus; identical to SEQ ID NO: 1404

SEQ ID NO: 5047 - DNA, 580 bp, Cricetulus griseus; identical to SEQ ID NO: 1405
  misc_feature (261)..(275): n is a, c, g, or t

SEQ ID NO: 5048 - DNA, 581 bp, Cricetulus griseus; identical to SEQ ID NO: 1406

SEQ ID NO: 5049 - DNA, 548 bp, Cricetulus griseus; identical to SEQ ID NO: 1407
  misc_feature (469)..(469): n is a, c, g, or t

SEQ ID NO: 5050 - DNA, 326 bp, Cricetulus griseus
ccctcccccttgtcccgggatcgctccgtcgcacccaccatgatggaagacgacggacagccccggactctatatgtaggtaacctttccagagatgtgacagaagtccttatactccaggtggggggggagatcggaccctgtaaaagctgtaaaatgataacagagcatacaagcaatgatccatattgctttgtggaattttatgaacacagagatgcagctgctgcattagctgctatgaatgggagaaaaattttgggaaaggaggtcaaagtaaactgggcaacaacaccaagtagccagaaaaaagatactttcaatca

SEQ ID NO: 5051 - DNA, 354 bp, Cricetulus griseus; identical to SEQ ID NO: 1409

SEQ ID NO: 5052 - DNA, 580 bp, Cricetulus griseus; identical to SEQ ID NO: 1410

SEQ ID NO: 5053 - DNA, 373 bp, Cricetulus griseus; identical to SEQ ID NO: 1411

SEQ ID NO: 5054 - DNA, 600 bp, Cricetulus griseus; identical to SEQ ID NO: 1412
  misc_feature (395)..(412): n is a, c, g, or t
  misc_feature (540)..(540): n is a, c, g, or t

SEQ ID NO: 5055 - DNA, 581 bp, Cricetulus griseus; identical to SEQ ID NO: 1413

SEQ ID NO: 5056 - DNA, 580 bp, Cricetulus griseus; identical to SEQ ID NO: 1414

SEQ ID NO: 5057 - DNA, 392 bp, Cricetulus griseus
ccaccccgctccccttttgggacatacacctacatttccagataaataacccaacactgacctcatacttgcccgggactcgttaatgttgcagtatttaacatatctgccaagaccaggatgaacaacaatcccactcctacccggattccccggatggatcagcgaggagcagggctttgagactcctgttgggacagtcggtcagcagctgaccaggacggtttgctcggcacagccggatgattcagtgctgctatcagaagatgtttttattttgtgtgaatgattggaacttttaagcctcccctcctgttccctaccccctccctttgcacctgtttttttcccaatgggttccagacaaagatgacttataaatatatttagtg

SEQ ID NO: 5058 - DNA, 189 bp, Cricetulus griseus; identical to SEQ ID NO: 1416

SEQ ID NO: 5059 - DNA, 580 bp, Cricetulus griseus; identical to SEQ ID NO: 1417

SEQ ID NO: 5060 - DNA, 459 bp, Cricetulus griseus; identical to SEQ ID NO: 1418

SEQ ID NO: 5061 - DNA, 194 bp, Cricetulus griseus; identical to SEQ ID NO: 1419

SEQ ID NO: 5062 - DNA, 555 bp, Cricetulus griseus; identical to SEQ ID NO: 1420

SEQ ID NO: 5063 - DNA, 568 bp, Cricetulus griseus; identical to SEQ ID NO: 1421

SEQ ID NO: 5064 - DNA, 580 bp, Cricetulus griseus; identical to SEQ ID NO: 1422

SEQ ID NO: 5065 - DNA, 581 bp, Cricetulus griseus; identical to SEQ ID NO: 1423

SEQ ID NO: 5066 - DNA, 235 bp, Cricetulus griseus; identical to SEQ ID NO: 1424

SEQ ID NO: 5067 - DNA, 578 bp, Cricetulus griseus; identical to SEQ ID NO: 1425

SEQ ID NO: 5068 - DNA, 580 bp, Cricetulus griseus; identical to SEQ ID NO: 1426

SEQ ID NO: 5069 - DNA, 432 bp, Cricetulus griseus; identical to SEQ ID NO: 1427

SEQ ID NO: 5070 - DNA, 580 bp, Cricetulus griseus; identical to SEQ ID NO: 1428

SEQ ID NO: 5071 - DNA, 418 bp, Cricetulus griseus; identical to SEQ ID NO: 1429

SEQ ID NO: 5072 - DNA, 506 bp, Cricetulus griseus; identical to SEQ ID NO: 1430

SEQ ID NO: 5073 - DNA, 580 bp, Cricetulus griseus; identical to SEQ ID NO: 1431

SEQ ID NO: 5074 - DNA, 554 bp, Cricetulus griseus; identical to SEQ ID NO: 1432
  misc_feature (217)..(236): n is a, c, g, or t

SEQ ID NO: 5075 - DNA, 578 bp, Cricetulus griseus; identical to SEQ ID NO: 1433

SEQ ID NO: 5076 - DNA, 60 bp, Cricetulus griseus
acaacaaaaaactttatatttctatactaattattctacaaactcttctaatcccaacat

SEQ ID NO: 5077 - DNA, 566 bp, Cricetulus griseus; identical to SEQ ID NO: 1435

SEQ ID NO: 5078 - DNA, 99 bp, Cricetulus griseus; identical to SEQ ID NO: 1436

SEQ ID NO: 5079 - DNA, 600 bp, Cricetulus griseus; identical to SEQ ID NO: 1437
  misc_feature (34)..(77): n is a, c, g, or t

SEQ ID NO: 5080 - DNA, 546 bp, Cricetulus griseus
ataatggaagcatgaggcaagggtaggcagtaagatccgggcaagaaaaggataagagcaaggaactgcacgctattaaggaacgttatctgggtggcaccaaaacacggcgccgaacaaggcatctcaatgcccgaaagtttgtctttgagtgggaagcatctgaagatacctccattgactacaaccctctgtacaaagagcggcaccaggtgcatttgttggggcgaggcttcattgcaggcattgacctaaagcagcagaaacgagaacagtcacgtttctatggagacctaatggaaaacaagcgcaccctggaagaaaaggagcaagaggaggcaagactccgtaaactccgtaagaaggaagccaagcaacgctgggatgaccgccattggtcccagaagacgttagatgagatgacagacagggactggaggatcttccgggaagactatagcatcaccaccaaaggtggcaagatccccaatcccatccgggcctggaaagattcatctctgcccccacatattttggaagtcattg

SEQ ID NO: 5081 - DNA, 580 bp, Cricetulus griseus; identical to SEQ ID NO: 1439
  misc_feature (151)..(169): n is a, c, g, or t

SEQ ID NO: 5082 - DNA, 567 bp, Cricetulus griseus; identical to SEQ ID NO: 1440

SEQ ID NO: 5083 - DNA, 483 bp, Cricetulus griseus; identical to SEQ ID NO: 1441

SEQ ID NO: 5084 - DNA, 578 bp, Cricetulus griseus; identical to SEQ ID NO: 1442

SEQ ID NO: 5085 - DNA, 580 bp, Cricetulus griseus; identical to SEQ ID NO: 1443
  misc_feature (117)..(138): n is a, c, g, or t
  misc_feature (170)..(195): n is a, c, g, or t
  misc_feature (198)..(252): n is a, c, g, or t
  misc_feature (279)..(300): n is a, c, g, or t
  misc_feature (317)..(350): n is a, c, g, or t
  misc_feature (361)..(379): n is a, c, g, or t
  misc_feature (400)..(427): n is a, c, g, or t
  misc_feature (439)..(458): n is a, c, g, or t

SEQ ID NO: 5086 - DNA, 600 bp, Cricetulus griseus; identical to SEQ ID NO: 1444
  misc_feature (27)..(80): n is a, c, g, or t
  misc_feature (464)..(485): n is a, c, g, or t

SEQ ID NO: 5087 - DNA, 579 bp, Cricetulus griseus; identical to SEQ ID NO: 1445

SEQ ID NO: 5088 - DNA, 579 bp, Cricetulus griseus; identical to SEQ ID NO: 1446
  misc_feature (195)..(223): n is a, c, g, or t

SEQ ID NO: 5089 - DNA, 567 bp, Cricetulus griseus; identical to SEQ ID NO: 1447

SEQ ID NO: 5090 - DNA, 578 bp, Cricetulus griseus; identical to SEQ ID NO: 1448

SEQ ID NO: 5091 - DNA, 458 bp, Cricetulus griseus; identical to SEQ ID NO: 1449

SEQ ID NO: 5092 - DNA, 579 bp, Cricetulus griseus; identical to SEQ ID NO: 1450

SEQ ID NO: 5093 - DNA, 569 bp, Cricetulus griseus; identical to SEQ ID NO: 1451
  misc_feature (385)..(403): n is a, c, g, or t

SEQ ID NO: 5094 - DNA, 577 bp, Cricetulus griseus; identical to SEQ ID NO: 1452

SEQ ID NO: 5095 - DNA, 406 bp, Cricetulus griseus; identical to SEQ ID NO: 1453
  misc_feature (98)..(98): n is a, c, g, or t
  misc_feature (112)..(112): n is a, c, g, or t
  misc_feature (148)..(148): n is a, c, g, or t
  misc_feature (295)..(319): n is a, c, g, or t
  misc_feature (321)..(340): n is a, c, g, or t

SEQ ID NO: 5096 - DNA, 267 bp, Cricetulus griseus; identical to SEQ ID NO: 1454
  misc_feature (76)..(92): n is a, c, g, or t

SEQ ID NO: 5097 - DNA, 324 bp, Cricetulus griseus
  misc_feature (31)..(58): n is a, c, g, or t
  misc_feature (86)..(140): n is a, c, g, or t
  misc_feature (142)..(154): n is a, c, g, or t
  misc_feature (270)..(291): n is a, c, g, or t
aggtctatgaacatttcaaccacaaactagnnnnnnnnnnnnnnnnnnnnnnnnnnnnccactgccaatcaaattaggcctttctnnnnnnnnnnnnnnnnnnnnnnnnnnnnnnnnnnnnnnnnnnnnnnnnnnnnnnncnnnnnnnnnnnnntgacaaaaagtagccccaatgactattttacttcaaaggcatgaagctatcgatactaatatcctacccccctctgccctcatctcagcactagcgggagcatgaggaggcctatnnnnnnnnnnnnnnnnnnnnnngctagcttactcatcgcatcggccccataggct

SEQ ID NO: 5098 - DNA, 466 bp, Cricetulus griseus; identical to SEQ ID NO: 1456

SEQ ID NO: 5099 - DNA, 590 bp, Cricetulus griseus
tcgacaccacgcgtccgcagtaattttttaggctatagaatttaaatattgtaactaactatacttataaattatttaagagtgttttaagaataattttgactgcaaaataatgtcaatagagagtattaatatttgtaaactttgaaatttagagtcagaaaattcttttaatattttagtcctttatgtaataagtaatacctaatatattgcatggtattttagccattcataaaagctgtattgtgtatgcctctttatctagagagtgagcaggggcaaaatggagggaaggaaattaattactggtctccatgagagattgggtgtaggacccatgcagatacaaaacttccttgatgtctcataaaataaagtagtacaatatttgcatatagcttacatatatccttccccttgtttacttcctacatttctttatttcttaagattcataatgctgtataaatacctgttaagccgttgttggataataatgacagaaaacatctatacatgtttggaataattttttcatgaatgttttcaatctataccttgaatctaaggatttagaatctacagta

SEQ ID NO: 5100 - DNA, 579 bp, Cricetulus griseus; identical to SEQ ID NO: 1458

SEQ ID NO: 5101 - DNA, 567 bp, Cricetulus griseus; identical to SEQ ID NO: 1459

SEQ ID NO: 5102 - DNA, 210 bp, Cricetulus griseus; identical to SEQ ID NO: 1460

SEQ ID NO: 5103 - DNA, 539 bp, Cricetulus griseus
  misc_feature (445)..(461): n is a, c, g, or t
aagggatggcctataaaaaatttggggttaatcattaaaagggaaaggggggtaagggggatttttattaaggaaagttctcggggggggaaaggtggaaaataaattatatggggggtaaactaacctcggggaggagtaattaggatttatagggaatatagggcggtaataaggatgttagtccctcctaaaaaaagggtaaaattggatcatgaaaatagggaaatggaaattattaattttccaattaaatcgcttgacgggggaagggctaggacatttagcctccctaaaaataaaaatagggctttaaggggaaaagctgtttgcaaaccccgggctataataataggccggtgggggatcccttcttgccttgttccaccaaaacaaattactcgaaaaaatgtaccaccttgcccgatctttacgggggaggctnnnnnnnnnnnnnnnnnggctggaaccatatacacccgcaaacactatcgccctgtgactgacggagcgattggcacaaaataaccccacgtccg

SEQ ID NO: 5104 - DNA, 76 bp, Cricetulus griseus
cttcctgcgagaaactgacatcccctaaattcgataggtatgtattcaaatcctatcgaaattcctggcgctgcac

SEQ ID NO: 5105 - DNA, 364 bp, Cricetulus griseus
  misc_feature (39)..(98): n is a, c, g, or t
  misc_feature (101)..(123): n is a, c, g, or t
  misc_feature (125)..(153): n is a, c, g, or t
  misc_feature (183)..(244): n is a, c, g, or t
gaggagtttattacggttcatacactatagtagaacctnnnnnnnnnnnnnnnnnnnnnnnnnnnnnnnnnnnnnnnnnnnnnnnnnnnnnnnnnnnnctnnnnnnnnnnnnnnnnnnnnnnncnnnnnnnnnnnnnnnnnnnnnnnnnnnnncatctatcccttatataggtaccactctannnnnnnnnnnnnnnnnnnnnnnnnnnnnnnnnnnnnnnnnnnnnnnnnnnnnnnnnnnnnntccatttcatcctaccattcattatcgctgccctagcaatggtccatcttctattcctacatgaaaccgggtctaataacccatcacgcctagattctgacccagataaaactccatttc

SEQ ID NO: 5106 - DNA, 391 bp, Cricetulus griseus
tacttcaaatccaaaccagtagagactccacctgaacaaaatggcagcattgccccgcagcccaacagcagattgaaggaagctataaatacaagtaaagatcaggaaagcaagtaccaagccagccacccaaatctcagaaggctgcatgatgaagacccaacccccaaagggcctgcttctgctgtgactgctgaggtttacccaaagaactcaagtcttcgagcctatcatcaaaagatcgacaacaacctagatgagctgtccatgggattgggccgactcaaggacatagccttaggaatgcagacggaaattgaggagcaggatgacattcttgaccggctaacaaccaaagtggacaagttagatgtcaatataaaaagcacag

SEQ ID NO: 5107 - DNA, 523 bp, Cricetulus griseus; identical to SEQ ID NO: 1465

SEQ ID NO: 5108 - DNA, 578 bp, Cricetulus griseus; identical to SEQ ID NO: 1466

SEQ ID NO: 5109 - DNA, 77 bp, Cricetulus griseus
ctctacaaactcttctaatcccaacatccctcagcaaacgagcctacactattttatattctacctgaagccccact

SEQ ID NO: 5110 - DNA, 567 bp, Cricetulus griseus; identical to SEQ ID NO: 1468
  misc_feature (384)..(384): n is a, c, g, or t
  misc_feature (440)..(440): n is a, c, g, or t

SEQ ID NO: 5111 - DNA, 579 bp, Cricetulus griseus; identical to SEQ ID NO: 1469

SEQ ID NO: 5112 - DNA, 567 bp, Cricetulus griseus; identical to SEQ ID NO: 1470

SEQ ID NO: 5113 - DNA, 567 bp, Cricetulus griseus; identical to SEQ ID NO: 1471
  misc_feature (342)..(359): n is a, c, g, or t

SEQ ID NO: 5114 - DNA, 577 bp, Cricetulus griseus; identical to SEQ ID NO: 1472

SEQ ID NO: 5115 - DNA, 550 bp, Cricetulus griseus
  misc_feature (31)..(67): n is a, c, g, or t
  misc_feature (86)..(104): n is a, c, g, or t
  misc_feature (130)..(207): n is a, c, g, or t
  misc_feature (212)..(288): n is a, c, g, or t
  misc_feature (294)..(400): n is a, c, g, or t
  misc_feature (402)..(448): n is a, c, g, or t
cgaaattgaggtaccgaggcccccccttcgnnnnnnnnnnnnnnnnnnnnnnnnnnnnnnnnnnnnncattgtacgagagggtacnnnnnnnnnnnnnnnnnnncccattgtacaaaaagggctccgatnnnnnnnnnnnnnnnnnnnnnnnnnnnnnnnnnnnnnnnnnnnnnnnnnnnnnnnnnnnnnnnnnnnnnnnnnnnnnnagtannnnnnnnnnnnnnnnnnnnnnnnnnnnnnnnnnnnnnnnnnnnnnnnnnnnnnnnnnnnnnnnnnnnnnnnnnnnnaacacnnnnnnnnnnnnnnnnnnnnnnnnnnnnnnnnnnnnnnnnnnnnnnnnnnnnnnnnnnnnnnnnnnnnnnnnnnnnnnnnnnnnnnnnnnnnnnnnnnnnnnnnnnnannnnnnnnnnnnnnnnnnnnnnnnnnnnnnnnnnnnnnnnnnnnnnntttttccatctcagacggaatctatggatctacattctttatagcaacaggttttcacggtctccatgtaatcattggaacatcattccttacagtatgctt

SEQ ID NO: 5116 - DNA, 578 bp, Cricetulus griseus; identical to SEQ ID NO: 1474
  misc_feature (400)..(414): n is a, c, g, or t
  misc_feature (462)..(479): n is a, c, g, or t

SEQ ID NO: 5117 - DNA, 96 bp, Cricetulus griseus; identical to SEQ ID NO: 1475

SEQ ID NO: 5118 - DNA, 522 bp, Cricetulus griseus; identical to SEQ ID NO: 1476
  misc_feature (273)..(296): n is a, c, g, or t

SEQ ID NO: 5119 - DNA, 300 bp, Cricetulus griseus; identical to SEQ ID NO: 1477

SEQ ID NO: 5120 - DNA, 579 bp, Cricetulus griseus; identical to SEQ ID NO: 1478
  misc_feature (483)..(483): n is a, c, g, or t

SEQ ID NO: 5121 - DNA, 376 bp, Cricetulus griseus; identical to SEQ ID NO: 1479

SEQ ID NO: 5122 - DNA, 349 bp, Cricetulus griseus; identical to SEQ ID NO: 1480

SEQ ID NO: 5123 - DNA, 421 bp, Cricetulus griseus; identical to SEQ ID NO: 1481
  misc_feature (343)..(371): n is a, c, g, or t

SEQ ID NO: 5124 - DNA, 498 bp, Cricetulus griseus; identical to SEQ ID NO: 1482

SEQ ID NO: 5125 - DNA, 367 bp, Cricetulus griseus; identical to SEQ ID NO: 1483

SEQ ID NO: 5126 - DNA, 227 bp, Cricetulus griseus; identical to SEQ ID NO: 1484

SEQ ID NO: 5127 - DNA, 227 bp, Cricetulus griseus
aatgggtaaggatgtggtgatccagcagagctgtgtgaaatgagtgttaagcagcccagagaggaagggaaatcaccacattgaagagcagggagaattatagactcccacccagggtgtagagacatacacagagatacacagagactcagagacagagatacacagagacggagatagtgagtgctagagagagggagagtaagataatgaaatgagagacaaag

SEQ ID NO: 5128 - DNA, 103 bp, Cricetulus griseus; identical to SEQ ID NO: 1486

SEQ ID NO: 5129 - DNA, 475 bp, Cricetulus griseus; identical to SEQ ID NO: 1487

SEQ ID NO: 5130 - DNA, 362 bp, Cricetulus griseus; identical to SEQ ID NO: 1488

SEQ ID NO: 5131 - DNA, 442 bp, Cricetulus griseus; identical to SEQ ID NO: 1489

SEQ ID NO: 5132 - DNA, 548 bp, Cricetulus griseus; identical to SEQ ID NO: 1490

SEQ ID NO: 5133 - DNA, 513 bp, Cricetulus griseus
atgaatggtttcttctcagctcccatataccactaaagggcattgaaccaggatccctgcgtgttcgagcacgatactctatggaaaaaatcatgccagaagaagagtacagtgaatttaaagagcttatactacaaaaggaacttcatgtagtctatgctttatcacatgtatgtggacaagaccgaacactactagccagcatcctactgaagatttttcttcatgaaaagcttgaatcgttgttgttatgcacactaaatgacagagagataagtatggaagatgaagccactaccctatttcgagctacaacacttgctagtaccttgatggagcagtatatgaaagccactgccacacaatttgttcaccatgctttgaaagactccattttaaagataatggaaagcaaacagtcatgtgagttaagtccatcaaagttagaaaagaatgaagatgtgaacactaatttagcacacctattgaacatactttcagagcttgtggaga

SEQ ID NO: 5134 - DNA, 560 bp, Cricetulus griseus; identical to SEQ ID NO: 1492
  misc_feature (131)..(155): n is a, c, g, or t

SEQ ID NO: 5135 - DNA, 442 bp, Cricetulus griseus
  misc_feature (29)..(29): n is a, c, g, or t
  misc_feature (45)..(45): n is a, c, g, or t
  misc_feature (96)..(97): n is a, c, g, or t
  misc_feature (143)..(143): n is a, c, g, or t
  misc_feature (147)..(147): n is a, c, g, or t
  misc_feature (158)..(158): n is a, c, g, or t
  misc_feature (169)..(169): n is a, c, g, or t
  misc_feature (177)..(177): n is a, c, g, or t
  misc_feature (205)..(205): n is a, c, g, or t
  misc_feature (225)..(225): n is a, c, g, or t
  misc_feature (312)..(312): n is a, c, g, or t
  misc_feature (331)..(331): n is a, c, g, or t
  misc_feature (351)..(351): n is a, c, g, or t
  misc_feature (361)..(361): n is a, c, g, or t
  misc_feature (369)..(369): n is a, c, g, or t
  misc_feature (389)..(389): n is a, c, g, or t
  misc_feature (399)..(399): n is a, c, g, or t
  misc_feature (406)..(406): n is a, c, g, or t
  misc_feature (413)..(413): n is a, c, g, or t
cacttgtctcctacgggaaacagcacggngacatgcttggttacnatttgtatagcagtcgccctggcagacattctcagtgagcctaccatgcanncacccatttgtgtggggttgtatgcacagtggggaagtgggaagtntttnttactcaaganactagaagatnaaatgaanacttttgcaagacagcagattgagcccnttttccagttctcatggctnattgtgttcctgaccctgctgctgtgtggggggctgggcctagtgtttgcttttacagtacgatacaaatttcgacatagcagtttnattgagttgcctggctctnttatatatattcttaattgncatttacttnggtggacngagggaaggacagagttggnactgggcctnggccctnagtaccngactggcgagacacattggctacctggag

SEQ ID NO: 5136 - DNA, 565 bp, Cricetulus griseus
  misc_feature (369)..(369): n is a, c, g, or t
atttatcgcttttaggaataggctgaataattctctccactttgcacaagtgcgcactgaacggatgctgttagaccttctacttgaagcaaacatatcaactagcttggcagaaagtatcaaatcaatgaatctgagaccagaggaagatgatgttccatgggaagatttgagagacaacagagacttggatgttttctttagctgggatccaaaggacaggaatgtttctgaagagcataagaaactctccttggaggaggagaccatgtggttaagaattcgcaccttaacgctgaggctcatcagtggacttccgagtcttacccaccctgtggagccaaagaactcagagaagacctccgagantggtgtgtcctcccggattgacattcttcgtttgctcctccaacagctagaagtggccgtggagacggggaagcgatttattgagaaggaaattcagtatcccttccttgggcctgtccccaccaggatgggcaggttcttcagctctggttgctgtcagtgccaggtccgctcctttcatcttgtcagtgatgtg

SEQ ID NO: 5137 - DNA, 333 bp, Cricetulus griseus
  misc_feature (100)..(100): n is a, c, g, or t
  misc_feature (195)..(195): n is a, c, g, or t
  misc_feature (225)..(225): n is a, c, g, or t
  misc_feature (287)..(287): n is a, c, g, or t
  misc_feature (292)..(292): n is a, c, g, or t
  misc_feature (300)..(300): n is a, c, g, or t
  misc_feature (302)..(302): n is a, c, g, or t
accccaaatcctgacgcatgttatcgaagggtttgtgatccaggagggggcggagcctttcccggtgggacgctcgtccctgctggtggggaatctcaanaagtaagtatgcacaggggttcttgcctgagaagcttccccagcaggatcataccaccaccactgactcagagatggaggagccctatctgcaanaatccaaagaggagggcacccccctcaaantcaagtgtgagctctgtggacgggtggattttgcctacaagttcaagcgttctaagcgcttntgttncatggttngngcaaaaaggtataatgtgggatgcaccaaac

SEQ ID NO: 5138 - DNA, 315 bp, Cricetulus griseus
  misc_feature (59)..(59): n is a, c, g, or t
  misc_feature (206)..(206): n is a, c, g, or t
  misc_feature (289)..(289): n is a, c, g, or t
atcaggacaagtaccgctaccggtaccccaaaggcgagtcctatgaagacttggtgcancgactagagcctgtcattatggaactggagagacaggagaatgtgctggtcatttgccaccaggctgtgatgcgctgcctgctggcctacttccttgacaaggcagctgaagagctgccctacctcaaatgtcccttgcacacagtnctgaagctcacacctgtagcttacggttgtaaagtggagtccatattcctgaatgtggcagctgtgaacacacaccgagacangcctcagaatgtaaacatatccaggc

SEQ ID NO: 5139 - DNA, 565 bp, Cricetulus griseus
  misc_feature (66)..(66): n is a, c, g, or t
  misc_feature (165)..(165): n is a, c, g, or t
  misc_feature (286)..(286): n is a, c, g, or t
gcgcggtggtcgttagaggaggacagcgcaccgcatcctacctgctcgcaggccctcggcgtctancacccgccggcggcacatctcgtcatgtcaggcactgcttggctttagttcctcactcctccgcccacccgcctacccgaagccgcgcccaccgcccanagccagagggatggtggtagtcaccgggcgggagccagacagccgtcactgggacggtgccatgtccagctccgaagccgaagacgacttcctggagcccgccactcctacggccacgcangcggggcacgggctgcccctgctgccccaggagcatttcaggaagggaaccttgtgggtcccaagctaacctggacagtcctcgcttcccaccaagcctttgttgacttgcagattaatcaatcactatagattgagcaggagaggaatggagcacggtagacagtgagattcactctcagcagtagagctcctgcatagcatgtgaagtccctgaatgagaagaaaggaatgagcaccatgatgccccgatgcatttgaaagcagctattggtctctg

SEQ ID NO: 5140 - DNA, 579 bp, Cricetulus griseus; identical to SEQ ID NO: 1498
  misc_feature (506)..(506): n is a, c, g, or t

SEQ ID NO: 5141 - DNA, 565 bp, Cricetulus griseus; identical to SEQ ID NO: 1499

SEQ ID NO: 5142 - DNA, 580 bp, Cricetulus griseus; identical to SEQ ID NO: 1500
  misc_feature (432)..(432): n is a, c, g, or t
  misc_feature (544)..(544): n is a, c, g, or t

SEQ ID NO: 5143 - DNA, 512 bp, Cricetulus griseus; identical to SEQ ID NO: 1501
  misc_feature (107)..(107): n is a, c, g, or t
  misc_feature (356)..(356): n is a, c, g, or t
  misc_feature (410)..(410): n is a, c, g, or t
  misc_feature (472)..(472): n is a, c, g, or t
  misc_feature (487)..(487): n is a, c, g, or t

SEQ ID NO: 5144 - DNA, 462 bp, Cricetulus griseus; identical to SEQ ID NO: 1502
  misc_feature (414)..(414): n is a, c, g, or t
  misc_feature (419)..(419): n is a, c, g, or t
  misc_feature (430)..(430): n is a, c, g, or t

SEQ ID NO: 5145 - DNA, 578 bp, Cricetulus griseus; identical to SEQ ID NO: 1503
  misc_feature (366)..(366): n is a, c, g, or t
  misc_feature (368)..(368): n is a, c, g, or t
  misc_feature (480)..(480): n is a, c, g, or t
  misc_feature (532)..(548): n is a, c, g, or t

SEQ ID NO: 5146 - DNA, 553 bp, Cricetulus griseus
  misc_feature (49)..(70): n is a, c, g, or t
  misc_feature (126)..(126): n is a, c, g, or t
acgactacactcattagggcgatattgggtaccgggtccccccctcgannnnnnnnnnnnnnnnnnnnnngcgctgcagcgagctcgcgagtacaacgcgcgcctgttcggtctggcgcagcgcancgcccgagcgttgctggactacggcgtcaccgccgacgcgcgcgctctgctggcgggacagcgccacctgctgacggcccaggatgagaacggagacacgccactgcacctggccattatccatgggcagactggagtcattgagcagatagcccatgtcatctgtcatgcccagtaccttggggtcatcaacctcactaaccacctgcaccagacacctctgcacctagcagtaatcactgggcagacaagggtggtgagcttcctgctgcaggtgggtgcagaccccacactgctggatcgacatggagactcggctgtgcacctggctctgcgggcaggtgctgaagccctaagcctgttgcaggtgctgttgcatagtggggcccatgctgtgccccaaatattgcacatgcctgattttgca

SEQ ID NO: 5147 - DNA, 487 bp, Cricetulus griseus; identical to SEQ ID NO: 1505
  misc_feature (34)..(34): n is a, c, g, or t
  misc_feature (85)..(85): n is a, c, g, or t
  misc_feature (111)..(111): n is a, c, g, or t
  misc_feature (115)..(115): n is a, c, g, or t
  misc_feature (117)..(117): n is a, c, g, or t
  misc_feature (141)..(141): n is a, c, g, or t
  misc_feature (153)..(153): n is a, c, g, or t
  misc_feature (312)..(312): n is a, c, g, or t
  misc_feature (331)..(331): n is a, c, g, or t
  misc_feature (357)..(357): n is a, c, g, or t
  misc_feature (375)..(375): n is a, c, g, or t
  misc_feature (414)..(414): n is a, c, g, or t

SEQ ID NO: 5148 - DNA, 506 bp, Cricetulus griseus
  misc_feature (230)..(272): n is a, c, g, or t
  misc_feature (401)..(401): n is a, c, g, or t
cagcaaggcccccaatgcatccaacctgaaaattgtacggatggacagaactgcaggatgtgtgactggaggagaagaaatttatcttctctgtgacaaggttcagaaagatgacatccagattcggttttatgaggaggaagagaatggtgggttttgggaaggatttggagacttttcccccacggatgttcacagacagtttgccattgtcttcaaaactccaaagnnnnnnnnnnnnnnnnnnnnnnnnnnnnnnnnnnnnnnnnnnnagcttcggaggaaatcggatttggaaactagtgaaccgaaacccttcctctactatcctgaaatcaaagacaaagaggaagtccagaggaaacgccagaagctcatgcccaacttctcggacagtttcngcggtggcagtggagccggagcgggcggtggaggcatgttccgtagtggcggtggtggagggagtacccggaagtcctggcccagggtatggcttctcgcactac

SEQ ID NO: 5149 - DNA, 524 bp, Cricetulus griseus
aagaaacagctgagtcaggctgctcagaggtctggactcccagcagtaactatttggggaacaaaaagatgagggctttatcatcccctaccaggtgaaagataaaattgcagaagccagacaacaccaaaagtagtgcaactggagttatgcaaccatccctcactccagcaaacggtgaagacttggtaggtaggacgctgtggaagttaaaggagatgtggcttatttggtagtgtggctagcatgcagaagccctggattggattcccagtatgacataaaccagcttatctatcatctcagcacttgggagatggaaagcaggaggacgagaagtttaaggtcatccttaaatacatagcaattctgaggccaacctgagttacataaaacctatctcaacaaaaagaatcacattgaagaagggtcccttgtagctccatcagattggctcatgccagcaggtggcggtgagggcataaactgagtggctttttcctgagtcactaaatcacgtgtgg

SEQ ID NO: 5150 - DNA, 389 bp, Cricetulus griseus
  misc_feature (150)..(150): n is a, c, g, or t
  misc_feature (236)..(236): n is a, c, g, or t
  misc_feature (299)..(299): n is a, c, g, or t
  misc_feature (305)..(305): n is a, c, g, or t
  misc_feature (338)..(338): n is a, c, g, or t
  misc_feature (341)..(341): n is a, c, g, or t
tggacaggtttcctgtgaacttgtttctccaaaactcaatagagcaacagaaggtattctgttttttaaccttgaactttctcagatggctgctccagcttttgaacccggcaggcagtccgatctcctggtgaagctgaatcgactctnggaaaggtgtctaagaaattcaaagtgtatagatactgaatctctctgtgttgttgctggtgaaaaggtttggcagatccgtgtanacctacatttattaaatcatgatggaaatattattgacgccgccagtattgctgcaatcgtanccttgngtcacttccgaagaccggatgtctctgtccaanganaggaagtaacactgttcactcctgaagagcgggaccctgtgccactga

SEQ ID NO: 5151 - DNA, 186 bp, Cricetulus griseus; identical to SEQ ID NO: 1509
  misc_feature (108)..(108): n is a, c, g, or t

SEQ ID NO: 5152 - DNA, 560 bp, Cricetulus griseus
atcagatcctactctcctcgttcgtgcgcctcgctcgctctttccggcaaccatgtctgacaaacccgatatggctgagatcgagaaattcgataagtcgaaattgaagaagacagaaacgcaagagaaaaatcctctgccttcaaaagaaacgattgaacaggagaagcaagctggcgaatcgtaatgaggcgagcgccgccaatatgcactgtacattccacaagcattgccttcttattttacttcttttagctgtttaactttgtaagatgcaaagaggttggatcaagtttaaatgactgtgctgcccctttcacatcaaagaatcagaactactgaccaggaaggcctcccctgcctctcccacccatctgtcggtctggctggcagggagggaaaagaacttgcatgttggtgaaagaaaaagctgggtgggaggtggtgaaatacagaaaaaaattcaagatggtccaaggtgtcctgcaggatgtaaaatgcagtttgatcagagtgccattttttttgttcaaatgattttaattattggaatgcacaat

SEQ ID NO: 5153 - DNA, 533 bp, Cricetulus griseus
gttgatgctgggaaaagtactctgatgggccatatgctttatcttctgggtaatgtaaacaaaagaactatgcataagtatgaacaagaatctaaaaaggctggcaaggcttcctttgcatatgcatgggtcttggatgagactggagaagaaagggaaaggggagtaacaatggatgttggcatgacaaagtttgaaaccacaaccaaagttattacattaatggatgctccaggccataaggatttcattcctaacatgatcactggagcagcccaggcggatgtagctgttttagttgttgatgccagcagaggagagtttgaagctggatttgagactggaggacagactcgagagcatggccttttagtacgatctcttggagtgacacagcttgctgttgctgtcaataaaatggatcaggtaaattggcaacaagaaagatttcaagagattactggaaaacttgggcactttcttaagcaagcaggttttaaggagagtgatgtagcttttatccctacgagtgg

SEQ ID NO: 5154 - DNA, 524 bp, Cricetulus griseus
atggagtggcaccacgtgccaaaatgaaccaacagcgttcaaggaggtttagagcatcaaaggaaggaatggaagcagcagttgagaagcagcgagtcagagaagaaatacttgcaaaaggtggctttcttcctccagaagaaataaaagaaagatttgacagcaactgtattacaccaggaactgagttcatggacaatcttgctaaatgccttcgctattacatagctgatcgtttaaataatgaccctgggtggaaaaatttgacagttatattatctgatgctagtgcacctggtgaaggagaacacaaaatcatggattatattagaagacaaagagcccagcctaaccatgacccaaatactcatcattgtttatgtggagctgatgctgatctcattatgcttggtcttgctacacatgaacctaacttcaccataatcagagaagaattcaaaccaaacaaacccaaaccatgtgctctttgtaatcagtttggacatgaggttaaggattgtgaa

SEQ ID NO: 5155 - DNA, 564 bp, Cricetulus griseus; identical to SEQ ID NO: 1513
  misc_feature (524)..(524): n is a, c, g, or t

SEQ ID NO: 5156 - DNA, 561 bp, Cricetulus griseus
  misc_feature (387)..(387): n is a, c, g, or t
  misc_feature (403)..(403): n is a, c, g, or t
gtcctgaacggagcctccttcccggccatggggctcctgtcggacccggtgcgccggcgcgcgctcgcccgcttcgtcttgcgcctcaacactccgctctgcgtgctgagctacgtggctggcatcacctggtttttggcgctggctttcccgcccctaacccagcgcacttacatgtctgagaacgccatgggctccaccatggtggaggagcagtttgtaggtggagaccgcgctcgaagctttgcccgggacttcgctgcacaccgtaggaagtcgggggctctgccagtggcctggctggagcggtcgatgcgatccgtagggctggaggtctacactcagagcttctcccgcaaactgccctttccggatgagacccacgancgctatatggtgtcangtaccaatgtgtatggcatcctgcgggccccacgtgctgccagcaccgagtctctggtacttactgtaccctgtggtccagactctacaaatagccaggctgtggggctgctgttggcacttgctgcccatttccgagggcagatttactgggccaaa

SEQ ID NO: 5157 - DNA, 278 bp, Cricetulus griseus
  misc_feature (159)..(159): n is a, c, g, or t
  misc_feature (190)..(190): n is a, c, g, or t
  misc_feature (213)..(213): n is a, c, g, or t
  misc_feature (227)..(227): n is a, c, g, or t
  misc_feature (250)..(250): n is a, c, g, or t
gggggggggtggggatggatgtggtcatcatcctggttttaaaaaataaaaattagaaaaggaaatcaaagtcaattgtctaagtttaaaaaaggggactgtccctgatcctcacaggtcagggacacctccaaaggcactcgaaaggccagaacacangattgacttaggcaggcgaggaggcctgganagctgggcacaggaggctagganttggggagggaaanaaagcaggccgggcccctctctnttaaggctgcagggttttggctccagga

SEQ ID NO: 5158 - DNA, 525 bp, Cricetulus griseus; identical to SEQ ID NO: 1516
  misc_feature (93)..(93): n is a, c, g, or t
  misc_feature (334)..(334): n is a, c, g, or t

SEQ ID NO: 5159 - DNA, 535 bp, Cricetulus griseus
  misc_feature (37)..(37): n is a, c, g, or t
  misc_feature (399)..(399): n is a, c, g, or t
cagttaagcacaatatattttttagtttgaagctcantgcttgcctcatacaaaagttcaaggacccattttccatcaggggttggtatggtaccatgaacatgtctttacacacatcttggtctgtattgaataacaactctcacaattcttactgaagcaattcagtctaaatactcaagtctcatctataaattgtagataatgattactacatcatggagtacttgtgcatcctgcatgaaataagttacttgaggctgatgtattcctttaataatgtaaaaagaatattgaattcagttcaggaccattacaagattttttttgattactttcagcttgggtgaagctttaaattcttagttaaattccttttctaaagcactcatttattgnctattatttttctagttatctaggtgcattggggaattaaaatcatcatttaaaaatcatcccatggatatcacaagctcataaattgttagatgctaatgggaaagccaagaatctgctccaacttattattgta

SEQ ID NO: 5160 - DNA, 580 bp, Cricetulus griseus; identical to SEQ ID NO: 1518
  misc_feature (554)..(554): n is a, c, g, or t

SEQ ID NO: 5161 - DNA, 193 bp, Cricetulus griseus
gttcccggtctcggttgccggacccgccttccctccctcggtttccccttgccgacctacgcctttggcttctcctctcgcgtttccgccggtccgcttacccgctggccgcctcctgacaagcgggagggttacggtgtggacccagagaagccgaggcgccaggcggctgccaccccctctccccacttgc

SEQ ID NO: 5162 - DNA, 580 bp, Cricetulus griseus; identical to SEQ ID NO: 1520

SEQ ID NO: 5163 - DNA, 578 bp, Cricetulus griseus; identical to SEQ ID NO: 1521
  misc_feature (522)..(522): n is a, c, g, or t
  misc_feature (551)..(551): n is a, c, g, or t

SEQ ID NO: 5164 - DNA, 558 bp, Cricetulus griseus
  misc_feature (408)..(408): n is a, c, g, or t
  misc_feature (453)..(453): n is a, c, g, or t
  misc_feature (502)..(502): n is a, c, g, or t
  misc_feature (520)..(520): n is a, c, g, or t
ttgggatagttgtgtgaggctggccccgttagcctctggagccctacctcggcaaatccaggctttggctagagttcaagttgagtttccctcttgtttatgtggccatggggcagtcaggaggggctcattgtccctctgttgtggcactggctgctcagtgtctgtgaagttgtggcccgtctgtgaagttgtggcccgtctgtgctaggcagagcagggcttgggcttgctcatggccccagaggcctgctcaggggctggatatgtccctgccaagtcactgcccatcagactcctctgttcctttctagtccacatatccctttgttaccagctcccttgtactcgtgggagggagcagctaccctgatctgtgtctacagttggaggctaccgtagttggangatgctgcgtccgccgttagccctgggggtggtaccacccttganggtttccaggtctttggccagacccagatcccagttagcctcttgttgngttatgttctaaaccaangcctttgctatgaagaagtgtttcatatgaaccatttt

SEQ ID NO: 5165 - DNA, 287 bp, Cricetulus griseus
  misc_feature (35)..(35): n is a, c, g, or t
  misc_feature (37)..(37): n is a, c, g, or t
  misc_feature (106)..(106): n is a, c, g, or t
  misc_feature (224)..(224): n is a, c, g, or t
gtggaaagaaaagttctagattaccaaactccagnangagtttggctgtagcctttatttgctgatctccatgccatgatgttagaacaacttctaagaaaccagnataaggggaaggaagacatccatgtacaattctcatcctgtcctccactttccatattagcacaggggctgctgtggctcacttgaatgcaggtggaaacattctcatcccatgagancttatccagggatcctgattttatagagggacctttatgggctctggcacttgctaggaatgg

SEQ ID NO: 5166 - DNA, 556 bp, Cricetulus griseus
  misc_feature (107)..(107): n is a, c, g, or t
  misc_feature (236)..(236): n is a, c, g, or t
  misc_feature (290)..(290): n is a, c, g, or t
acagagaacattaaagtaatagtttaagcttagggcttagctttaatcttatttggagtattaaacaggattctggatatcagcaatgtaatttaaaagtacaggcnaagggactggcattgtatattattggtaacacacttgtctggcatgcacaaggctctggatttagttcccagtgctgtttaaaacaacaaccacactagtaagcagtaaggagtttctctgttatatcngttgttatctgggaagcagggtggtttcactgttgaatatggactatatatagnatcagacctaggttcatttcttgaactcgtcataatacttacagcaatgtaatcaccgtctgttgagcatattgtgtacctgctaagtcattgatttttttgttatctcacttaattttctctgtaattctggaaggtaagtttagactcttcattttcctgttagagaaactgcagctaagagtaattacagagtgagctctatctctgatttctctctttatcctttctattatgtaatagtatttctttttttctctagctag

SEQ ID NO: 5167 - DNA, 373 bp, Cricetulus griseus
  misc_feature (112)..(112): n is a, c, g, or t
  misc_feature (214)..(214): n is a, c, g, or t
  misc_feature (283)..(283): n is a, c, g, or t
  misc_feature (314)..(314): n is a, c, g, or t
  misc_feature (328)..(328): n is a, c, g, or t
  misc_feature (343)..(343): n is a, c, g, or t
attgacatgtaaaataatcttgtttctaatttaaataaaaaatgggagggaaaaggagggagcaaacattcctctctttgctttcagatgaatcaatttgcccccttgtggnagtatgccaaagactaaattacagggccctcaatccaacaacatacccaagaagactaatgtcctgggagtttgttagacataaggttgaagtccccagggnacccttggtaaagctgcggcaagattctgtgctgtcttgaaataaaatggtcccaaaattatagatganggtggcatttgtgtttgtgtgtatgtgggantttgcaattaagantgtcctgtctcccanaactcacaagacataggcagatggatctct

SEQ ID NO: 5168 - DNA, 137 bp, Cricetulus griseus
  misc_feature (71)..(71): n is a, c, g, or t
  misc_feature (77)..(77): n is a, c, g, or t
  misc_feature (101)..(101): n is a, c, g, or t
  misc_feature (118)..(118): n is a, c, g, or t
  misc_feature (123)..(123): n is a, c, g, or t
tatgctctcctctggtttctcacttgaggatccccaaacccactccaaccgcatataccgcatgatcaaantaggcntgggtatcgatgaagatgaggtgncagcataggagcccagngctgntgttcctgatgaga

SEQ ID NO: 5169 - DNA, 518 bp, Cricetulus griseus
gcgtgggtttttgacataacattttctcagcatttttcacatctagtaacttaaaacattacacttaactgtgattctggtgactgctaataattttgtgagctcaacccctttttaaaattttatttatttttatatgtgtggtagttttgcctgcatttatgttccagtgagaccaggtattggatcccctgggattagagttgcagaaactgtgatctgctatgttaatatgggtcctgggatcaaacctgagtcctctggaagaacagccagtgctcttaactgccgaggcatctttctggtttcctcaaaactctttgtaaaatgaatattgttccatgactttcagtcttttatatttgctgtgattaagggaaaactacattctagtaaaagtgtttggtatagttaaccccaaaattcttaaccaaaataataaagtttgactaaatttataggttgcatataaagttgtagtaatggagcagagtcatatttaaaatacttttgtatta

SEQ ID NO: 5170 - DNA, 580 bp, Cricetulus griseus; identical to SEQ ID NO: 1528
  misc_feature (364)..(396): n is a, c, g, or t

SEQ ID NO: 5171 - DNA, 546 bp, Cricetulus griseus; identical to SEQ ID NO: 1529
  misc_feature (246)..(278): n is a, c, g, or t
  misc_feature (329)..(349): n is a, c, g, or t
  misc_feature (405)..(405): n is a, c, g, or t
  misc_feature (427)..(427): n is a, c, g, or t
  misc_feature (494)..(494): n is a, c, g, or t
  misc_feature (510)..(510): n is a, c, g, or t

SEQ ID NO: 5172 - DNA, 467 bp, Cricetulus griseus
  misc_feature (74)..(74): n is a, c, g, or t
  misc_feature (240)..(276): n is a, c, g, or t
  misc_feature (337)..(355): n is a, c, g, or t
ttctccccctaggttggggttacatgtgtcatcatgaatagcacttttttgcatggggtggcaatggtacttanaggcaagccagtttactgagtcacttcctaagcactaaattttgatttctttctttttaaaattaaaaaaacaaaaaccaagatattgtctaggcttttaaaagaattgttgacaaaagataacatcccctttagaaagtttttcattcgcctgcattggtggtgnnnnnnnnnnnnnnnnnnnnnnnnnnnnnnnnnnnnnatggatctctgggagttcgaggccagcctggtgtatagagagagttccaggacagccaggnnnnnnnnnnnnnnnnnnnccttgaaaaacaaaaacaaacaagccaaagaagctgggtgctgaggcctcaaaagataggaaggagcgaggttgagctcctcccctcctcctctcttgggctgatgctttca

SEQ ID NO: 5173 - DNA, 369 bp, Cricetulus griseus
  misc_feature (309)..(309): n is a, c, g, or t
aagtctgatgtcgaacttttaatgttttcagtgttctctaatttttaggagttttttgtagcctttacacctggaaaaaagatttgtaaaatcaccaaaataattgtgtgctttattttttaagtagtgattataggtgttacatcccatagttactgcaagatttattgccgtatattggagcagatgtctcattaacataagagtacttaggaagtgaagtccttttgtgcattttcaacatttatcaactggcaatcagaaaatgtttactgtgaagaggaatctccaacttacatagcccttttnggtatgtttaataattcttaatggggcttgcctgtaagtatgatatgcatagcatcttag

SEQ ID NO: 5174 - DNA, 517 bp, Cricetulus griseus; identical to SEQ ID NO: 1532
  misc_feature (351)..(351): n is a, c, g, or t
  misc_feature (416)..(416): n is a, c, g, or t
  misc_feature (423)..(423): n is a, c, g, or t
  misc_feature (432)..(432): n is a, c, g, or t
  misc_feature (447)..(447): n is a, c, g, or t

SEQ ID NO: 5175 - DNA, 508 bp, Cricetulus griseus
  misc_feature (114)..(152): n is a, c, g, or t
  misc_feature (467)..(467): n is a, c, g, or t
ctcaactccccacttcatcctccatgaaggcccatgttcattcctactctataccttggtcctactgatgctctattaccaaaggcctaaaggttaagtaggagtaacaccttnnnnnnnnnnnnnnnnnnnnnnnnnnnnnnnnnnnnnnnctcagctggctttctgggttttctcaggtaacctgcttcctcagggctgttcccacagaggcctcagggttatctcccccttagcaaagtccccactaggattgctggcttggggcctacagcagggctcctcagcctgcctgctgttgtgttacaggaaactcttggccaccgcatgtcccatggagccctgacatgtggtcagcatagcctttctccttggcttgggccttccaggtagccccatttggggtgcctgagtgcagacttctctgtgattgccctgtggttccttggttggacagtttcccccanaagaccacagggcaactgtcaagctgctcaccccttcccaa

SEQ ID NO: 5176 - DNA, 489 bp, Cricetulus griseus; identical to SEQ ID NO: 1534

SEQ ID NO: 5177 - DNA, 501 bp, Cricetulus griseus; identical to SEQ ID NO: 1535
  misc_feature (427)..(427): n is a, c, g, or t

SEQ ID NO: 5178 - DNA, 110 bp, Cricetulus griseus; identical to SEQ ID NO: 1536
  misc_feature (80)..(80): n is a, c, g, or t

SEQ ID NO: 5179 - DNA, 278 bp, Cricetulus griseus
  misc_feature (137)..(137): n is a, c, g, or t
gccccagcagcttctgctccagctcaggccaaaccagatctggaaaagcagacaaaagcttcccctaggaaaggcaccccagccacccctgcatctgccatggtctcctctatgcgagtgagcaccgcaccctctantgaggaggggtcaggagctgctcctggcactacaagggtgcaggggaagtctgtggggaagggcctccaagggaaaggtgacttgggacaagggatggccccagtgcaccctgagaggccggggcctacagttgcccatgt

SEQ ID NO: 5180 - DNA, 462 bp, Cricetulus griseus
  misc_feature (375)..(375): n is a, c, g, or t
  misc_feature (385)..(385): n is a, c, g, or t
  misc_feature (436)..(436): n is a, c, g, or t
gaggtccgttgtgtgagcaagctgctatggtgctgagttcccgggtagagtcgaccgagccggggcggtcgcggccatgaaggcgggtgctacttctatgtgggcttcatgctgtgggctgctgaatgaagtcatgggaactggagctgtcagaggtcagcaggcaggatttccaggaagcacggggccattcagatttacaccaagttctgactttcccacctacccaccagcagctactgaagggcccaatatagtttgcaaagcgtgtggactttcattttcagtctttataaagaagcacgtctgctgtgactgcaaaaaggacttttgctccttttgctcagtttcacaagaaaacctccgcagatgttntacttgtcanctactccaagagacagccttccagcgccctcagttgatgcgactgaaagtnaaggacctacggcagtatctcctcct

SEQ ID NO: 5181 - DNA, 555 bp, Cricetulus griseus
  misc_feature (33)..(67): n is a, c, g, or t
  misc_feature (333)..(333): n is a, c, g, or t
  misc_feature (393)..(393): n is a, c, g, or t
  misc_feature (492)..(492): n is a, c, g, or t
agggcgatattgggtaccgggtccccccctcgnnnnnnnnnnnnnnnnnnnnnnnnnnnnnnnnnnncttttctttcattgggggaaggcgtgaggaaagtaccaaacagcagcaggacttttaaactttaaatagacaggtctgggagcctgagccctccttttctttgacttcagcctccaaggagcctcaccgctttggcgcgccggcttcgctttcattaagcgaaagagaagtgcccagacatgggtgactggagtgccttggggaagcttctggacaaggtccaagcctactccaccgctggcgggaaggtgtggctgtccgtgctnttcatttttagaatcctgctgctggggacagcggttgagtcagcatggggtgatgagcantccgcctttcgctgtaacactcagcaacctggttgtgaaaatgtctgctacgacaagtccttccccatctctcacgtgcgcttctgggtccttcagatnatattcgtgtctgtgcccacgctcctgtatttggctcacgtgttctatgtgatgagaaaggaa

SEQ ID NO: 5182 - DNA, 562 bp, Cricetulus griseus
agtattttttaaaggaacaaaataagcatgaattaacttttcaatataagctatgacgtgtaatagttggttatgaattgtagtggcaccagctagcacctctgtcatttaaggatctttttgaatgcttttagaagaatcccttattttcaagggttaaaatgagcagacaaactattctttccctggctaaagctgctgtgggaaccctcagcttaggaaggtggaaatctgttggcgctttggtttagtgtagcacgggaatggaagtagaaaagttttattcagttctttgagtgctcagaaaatgcaatcagtgtattatatatgatgattcgtagtcagaatcaatgtattatacgtgatgattcatagtcatttgtagtcatcgaccctaaggctttttactaagaaactagctgaagattcacccttgaattaggtctggggaaatggccaccatcaggaggatttactttagaacaaaaatgaaattctagtctaactcaatagtgtgtggtgagtgtgcagaccatagggcattggtgagtgcctgcaattt

SEQ ID NO: 5183 - DNA, 580 bp, Cricetulus griseus; identical to SEQ ID NO: 1541
  misc_feature (346)..(346): n is a, c, g, or t
  misc_feature (427)..(427): n is a, c, g, or t
  misc_feature (510)..(510): n is a, c, g, or t
  misc_feature (534)..(534): n is a, c, g, or t

SEQ ID NO: 5184 - DNA, 371 bp, Cricetulus griseus
  misc_feature (45)..(45): n is a, c, g, or t
  misc_feature (124)..(124): n is a, c, g, or t
  misc_feature (220)..(220): n is a, c, g, or t
  misc_feature (338)..(338): n is a, c, g, or t
tacagtggccaggttgaatagcaggtgagctgaaggaaagaaganagttctggaaggagacgagacagaatcttgggtaaagaaggctaagactggggtctccatgcaagtgaaagtaccccanggacactgagtggaaggaaggcagaatgcacagggtccatccacactgagagaagaagcccttcacctgagggtgaaatctagaagctcagcatanaaaaggcctggggacttgaggaaccagtaaagtgaaaaaccataccagcaatgtctgaaaggccattggagccaacataagccattctcacagcatgaccacaacccatggtgctganacaaacactgtctaacagaaggcactgggcact

SEQ ID NO: 5185 - DNA, 313 bp, Cricetulus griseus
  misc_feature (153)..(153): n is a, c, g, or t
  misc_feature (203)..(203): n is a, c, g, or t
acaagctacaaaatctccagatggtgttaatagaagtgaagcatcccctcctcagtcgggcgacacacagtacctttgcacagaagctccagctccgagtgccttcagtggagtctctgtttcggagtcccataaaggaatctctgttctggncttctaaagagtctttagtgcgaacatcttccagagagtccctgagccancttgacctggactgtcccgctgccacctttgacccaccttctgatatggagagcgaggctgaagacgcaccaggcagctctgacagcctcaacagatagcagttgcttca

SEQ ID NO: 5186 - DNA, 551 bp, Cricetulus griseus
  misc_feature (72)..(72): n is a, c, g, or t
  misc_feature (434)..(434): n is a, c, g, or t
  misc_feature (473)..(492): n is a, c, g, or t
atacagaatttaaaagattcttctcttctggaaagtgataagaaaaggaaaggtaggccaaagggcaaaggnaaacaaaagaaagcacagagcatcttcaagtaagtagatggagaagtagaagctgttctgcagaagaaagctaaagcaaggagtatagagttacagatttccagtgtgaagtttgaagatgttggaggcaatgatgcaacattaaaagaagtctgcaaaatgctcatacacatgcgccacccggaagtataccaacaccttggtgtcaccccgcctcgtggagttctcttgcatggaccaccaggctgcgggaagacattacttgcacatgcaattgctggggaacttgacttgccaattctgaaagtggctgcaccagagattgtgtcaggagtttcaggggagtctgagcaaaagctcanagatttatttgaccaagctgtgtcaaacgccccctgtannnnnnnnnnnnnnnnnnnngatgctattacccccaaaagagaagttgcttcaaaagatatggaaagaagaattgtagc

SEQ ID NO: 5187 - DNA, 579 bp, Cricetulus griseus; identical to SEQ ID NO: 1545
  misc_feature (137)..(208): n is a, c, g, or t

SEQ ID NO: 5188 - DNA, 581 bp, Cricetulus griseus; identical to SEQ ID NO: 1546

SEQ ID NO: 5189 - DNA, 470 bp, Cricetulus griseus; identical to SEQ ID NO: 1547
  misc_feature (368)..(387): n is a, c, g, or t

SEQ ID NO: 5190 - DNA, 580 bp, Cricetulus griseus; identical to SEQ ID NO: 1548

SEQ ID NO: 5191 - DNA, 579 bp, Cricetulus griseus; identical to SEQ ID NO: 1549

SEQ ID NO: 5192 - DNA, 571 bp, Cricetulus griseus
cacgtgacttcctacactgtgaaccatggccctgccattccggaaggacttaactgagtataaggacctggatgaagatgagctccttaacaatctgtcagaaacagagctgaaacagcttgaaactgtcctggatgatctcgaccccgagaatgctcttctgcctgcagggtttcggcagaagaaccagacgtcaaagtctgccacgggaccctttgatagagaacatctgctttcttatctagagaaggaagcattggaacataaagaccgggaagactatgtgcccttcactggagagaaaaaagggaaaatttttatccccaaacagaaacctgtgcagacttttgcagaagaaagcatatcccttgatccagaattagaagaagctttgacaagtgcctctgatacagaattgtgtgatcttgcagctatccttgggatgcacaatctgattacagacacacagttctaggacgtggtgagaagtagtaatggtgtcaaccaagaacatttttcaaatgtggtaaaaggtgaaacgattcttccagtgtttgatcagccaccaaat

SEQ ID NO: 5193 - DNA, 147 bp, Cricetulus griseus; identical to SEQ ID NO: 1551

SEQ ID NO: 5194 - DNA, 147 bp, Cricetulus griseus
accctcctccattattcaagagtctggggcaagaggaactccttttagggaagaaaacaggggttctccaagaagcaggctaaaagaagttcgttcaaaagatacaccctctcctcctcctcccgggaacggtcgtggggtacgaac

SEQ ID NO: 5195 - DNA, 194 bp, Cricetulus griseus
ggaaggttttccttcaaaaagttaagtgatgccagttgatcccccatccacaaatttaaagtggatacccgggtgccctcctccaaaccaaacattttaaaaacccccctttgttaaagttaaataaaaaaggaagggtttgaaccccctaaaattgggttcaaacccactccaaaacctttatgtttttttcc

SEQ ID NO: 5196 - DNA, 580 bp, Cricetulus griseus; identical to SEQ ID NO: 1554
  misc_feature (467)..(481): n is a, c, g, or t

SEQ ID NO: 5197 - DNA, 580 bp, Cricetulus griseus
  misc_feature (100)..(114): n is a, c, g, or t
gtagtactccattgtataaatgtaccacattttctctacccattcttcagtgaaggggcatataggttgcttccaggttctggctattacaaacaatgcnnnnnnnnnnnnnnntgaacatatatgtccttgttgtatgaatgtgcattgagtacgtgcccaagagaggaattgctggatcttgaggcagactgattcccatttttctgagcaaccgctatactgatttctaaagtggtcttacaagttcgcactcccaccaccaatggaggagtattcctttttctccacatcctctccagcatagatcttcattggttgttacagtaaatctttctgccaaaagccacagagccccaccgccacgtgtatgctttacgcaagctgcctgcccaagttagggcccaaatgaatacacagaaacttgtattaagttcaaagctgcttggccaatgactaggattctcatctgctagctcagtcttaactgtcataaatctatatattttataagacttatcttatcggaagccttattggcgtccctccttgctgtggatcacatcgtgctactggaaca

SEQ ID NO: 5198 - DNA, 239 bp, Cricetulus griseus
cgcgtccggagcaaccctgtctcacaatgacgaaaccaaaaacagacggacgcaacccactgagctattctacccaccgctgtaactcatattttaaagggactttctataattgagctccaaaactagatatcctatcattcccaacagtcccttcagatctgcactatacaaggtatagagaatctcgttttgtgcccgttatccatgctgaataccatggcgattctacttcacca

SEQ ID NO: 5199 - DNA, 576 bp, Cricetulus griseus; identical to SEQ ID NO: 1557
  misc_feature (225)..(240): n is a, c, g, or t

SEQ ID NO: 5200 - DNA, 579 bp, Cricetulus griseus; identical to SEQ ID NO: 1558

SEQ ID NO: 5201 - DNA, 362 bp, Cricetulus griseus; identical to SEQ ID NO: 1559
  misc_feature (228)..(252): n is a, c, g, or t
  misc_feature (255)..(267): n is a, c, g, or t

SEQ ID NO: 5202 - DNA, 570 bp, Cricetulus griseus; identical to SEQ ID NO: 1560
  misc_feature (50)..(78): n is a, c, g, or t
  misc_feature (114)..(150): n is a, c, g, or t
  misc_feature (210)..(244): n is a, c, g, or t
  misc_feature (291)..(341): n is a, c, g, or t
  misc_feature (436)..(467): n is a, c, g, or t

SEQ ID NO: 5203 - DNA, 568 bp, Cricetulus griseus; identical to SEQ ID NO: 1561

SEQ ID NO: 5204 - DNA, 455 bp, Cricetulus griseus
  misc_feature (330)..(356): n is a, c, g, or t
  misc_feature (358)..(371): n is a, c, g, or t
aaaaatatactcgcacatatcatgcgccacacacactgagaacatccgctctgtgtatgctgccgtcaagaacaccatctcgcatataaacgtgaaggagagcaatatggtctaaatgtgcgtcccagaaaccattcttcccttccctgtgggctgtggaagataaccaagaagaactgtgtgtctgtgtaaaacaatttgcataaaactaatatatagccgttctggactctgtgagagagtccacacagctgtagaaaatattataattttatataaactattcacagagaacagaatgttgaagagcagtcccagcacatttcttcnnnnnnnnnnnnnnnnnnnnnnnnnnntnnnnnnnnnnnnnntcccttttttagacaaaccctatgactcaatgtattttaaattttcagtcattcacaatataaaagcactcatgtcatttctgt

SEQ ID NO: 5205 - DNA, 579 bp, Cricetulus griseus; identical to SEQ ID NO: 1563

SEQ ID NO: 5206 - DNA, 579 bp, Cricetulus griseus; identical to SEQ ID NO: 1564
  misc_feature (547)..(547): n is a, c, g, or t

SEQ ID NO: 5207 - DNA, 600 bp, Cricetulus griseus; identical to SEQ ID NO: 1565
  misc_feature (286)..(305): n is a, c, g, or t

SEQ ID NO: 5208 - DNA, 547 bp, Cricetulus griseus
ccaggttcctccttaagtttctgccatgtcttctctgaataataggttactaactgtacaatgaaataaatcctttctcccaagttgcttttggtcaaagtgccccctccacaggaatagaaaccctaactaaaccaacctcagactaatactaattttttgaaatactgttattgtgaaatattgttactatgtagccccaactcaaaagaaaaaataaatttcaatacatgtatttctgtggaatatagaatgttcaaaatttgtgaaaactgaagtatttctgcctggtgagtcattttcaattttaatactctttttattatcaaattatatcttcatatcttgtcattgtctgggcctaatttattaggcaattctaaaataaccagggctcttcttataccaatttaaattatatccactgttaaattgtaagtaaagtctatgaaaataaaatcattttagattttttaagttatttatatttaaaaaatcacttcacctaccattgttaacatgtaaatacagagtgaaacatctcact

SEQ ID NO: 5209 - DNA, 204 bp, Cricetulus griseus
aaaaataaacttttatttaaattaaaaacaattttattttgtataccaatcccagttcccactccctccctcccatgccctcccaaccccccttcccacccctgtccactccccatggagggtgaggcctcccatgggggatcatcaaagtttgacacattcatcatttagagaaagccctaagccctaacctgtgtatctagg

SEQ ID NO: 5210 - DNA, 568 bp, Cricetulus griseus; identical to SEQ ID NO: 1568
  misc_feature (62)..(208): n is a, c, g, or t
  misc_feature (231)..(288): n is a, c, g, or t
  misc_feature (303)..(436): n is a, c, g, or t
  misc_feature (491)..(508): n is a, c, g, or t

SEQ ID NO: 5211 - DNA, 567 bp, Cricetulus griseus; identical to SEQ ID NO: 1569
  misc_feature (182)..(201): n is a, c, g, or t

SEQ ID NO: 5212 - DNA, 567 bp, Cricetulus griseus
  misc_feature (367)..(386): n is a, c, g, or t
cagttccttatgtgatggtgacctggccccccaaccataaaattatttcattgctacttcataattgtaattttgctactgttatgaatcataatcaaatatctgatatgcaggacatctaatatcaaccaccactggcttaaaatctgaatttttcctctaatttaaaatacagcattacccctttttaaacagaaaaataaaaactctccaacataaatactggtattaatattcaactcgaacagtcttttataccaaattttgtttatgcctttggctccaatttatgattcaattcattctaaggatacataacaggtaagggaagaagtgcttctgcttcaactggtacccttactaaggnnnnnnnnnnnnnnnnnnnntacaaactttgtgaaagaacttttttttttagctattgggatgtcttctggaggtggctatggagttaacccctttaatctcagccttttgaagcaaaggcaggcaaatctctgagttccaggccataaattgagaggaagacccaaaacaataaataagaatatcttaatgctgcctagg

SEQ ID NO: 5213 - DNA, 569 bp, Cricetulus griseus; identical to SEQ ID NO: 1571

SEQ ID NO: 5214 - DNA, 554 bp, Cricetulus griseus; identical to SEQ ID NO: 1572

SEQ ID NO: 5215 - DNA, 580 bp, Cricetulus griseus; identical to SEQ ID NO: 1573

SEQ ID NO: 5216 - DNA, 174 bp, Cricetulus griseus; identical to SEQ ID NO: 1574
  misc_feature (119)..(137): n is a, c, g, or t

SEQ ID NO: 5217 - DNA, 555 bp, Cricetulus griseus; identical to SEQ ID NO: 1575

SEQ ID NO: 5218 - DNA, 578 bp, Cricetulus griseus; identical to SEQ ID NO: 1576

SEQ ID NO: 5219 - DNA, 493 bp, Cricetulus griseus; identical to SEQ ID NO: 1577

SEQ ID NO: 5220 - DNA, 600 bp, Cricetulus griseus; identical to SEQ ID NO: 1578

SEQ ID NO: 5221 - DNA, 562 bp, Cricetulus griseus; identical to SEQ ID NO: 1579

SEQ ID NO: 5222 - DNA, 503 bp, Cricetulus griseus; identical to SEQ ID NO: 1580

SEQ ID NO: 5223 - DNA, 505 bp, Cricetulus griseus; identical to SEQ ID NO: 1581

SEQ ID NO: 5224 - DNA, 505 bp, Cricetulus griseus; identical to SEQ ID NO: 1582
  misc_feature (133)..(153): n is a, c, g, or t

SEQ ID NO: 5225 - DNA, 505 bp, Cricetulus griseus; identical to SEQ ID NO: 1583

SEQ ID NO: 5226 - DNA, 578 bp, Cricetulus griseus; identical to SEQ ID NO: 1584

SEQ ID NO: 5227 - DNA, 579 bp, Cricetulus griseus; identical to SEQ ID NO: 1585

SEQ ID NO: 5228 - DNA, 566 bp, Cricetulus griseus; identical to SEQ ID NO: 1586

SEQ ID NO: 5229 - DNA, 578 bp, Cricetulus griseus; identical to SEQ ID NO: 1587

SEQ ID NO: 5230 - DNA, 579 bp, Cricetulus griseus; identical to SEQ ID NO: 1588

SEQ ID NO: 5231 - DNA, 579 bp, Cricetulus griseus; identical to SEQ ID NO: 1589
  misc_feature (257)..(293): n is a, c, g, or t

SEQ ID NO: 5232 - DNA, 600 bp, Cricetulus griseus; identical to SEQ ID NO: 1590
  misc_feature (499)..(499): n is a, c, g, or t

SEQ ID NO: 5233 - DNA, 565 bp, Cricetulus griseus; identical to SEQ ID NO: 1591

SEQ ID NO: 5234 - DNA, 578 bp, Cricetulus griseus; identical to SEQ ID NO: 1592

SEQ ID NO: 5235 - DNA, 579 bp, Cricetulus griseus; identical to SEQ ID NO: 1593

SEQ ID NO: 5236 - DNA, 521 bp, Cricetulus griseus
  misc_feature (27)..(80): n is a, c, g, or t
  misc_feature (93)..(161): n is a, c, g, or t
  misc_feature (173)..(241): n is a, c, g, or t
  misc_feature (254)..(307): n is a, c, g, or t
  misc_feature (362)..(399): n is a, c, g, or t
aatgtctacgcttctatgtttaaaaannnnnnnnnnnnnnnnnnnnnnnnnnnnnnnnnnnnnnnnnnnnnnnnnnnnnncgataggtatgtnnnnnnnnnnnnnnnnnnnnnnnnnnnnnnnnnnnnnnnnnnnnnnnnnnnnnnnnnnnnnnnnnnnnngtagtgtcaaannnnnnnnnnnnnnnnnnnnnnnnnnnnnnnnnnnnnnnnnnnnnnnnnnnnnnnnnnnnnnnnnnnnnatactcctacctnnnnnnnnnnnnnnnnnnnnnnnnnnnnnnnnnnnnnnnnnnnnnnnnnnnnnnttcttaaccaatactttatctatagcaactttatgacacataaaccaaacacgcnnnnnnnnnnnnnnnnnnnnnnnnnnnnnnnnnnnnnnctgatcataaattatatcagttactctgacttttaccacttatactacctacctggtcgaaatgatcattaactaacgaaaccgactaccccacacaaccgtatattttctctacctaacct

SEQ ID NO: 5237 - DNA, 578 bp, Cricetulus griseus; identical to SEQ ID NO: 1595
  misc_feature (525)..(525): n is a, c, g, or t

SEQ ID NO: 5238 - DNA, 579 bp, Cricetulus griseus; identical to SEQ ID NO: 1596
  misc_feature (258)..(278): n is a, c, g, or t
  misc_feature (309)..(331): n is a, c, g, or t

SEQ ID NO: 5239 - DNA, 580 bp, Cricetulus griseus; identical to SEQ ID NO: 1597

SEQ ID NO: 5240 - DNA, 579 bp, Cricetulus griseus; identical to SEQ ID NO: 1598

SEQ ID NO: 5241 - DNA, 86 bp, Cricetulus griseus; identical to SEQ ID NO: 1599

SEQ ID NO: 5242 - DNA, 234 bp, Cricetulus griseus; identical to SEQ ID NO: 1600

SEQ ID NO: 5243 - DNA, 210 bp, Cricetulus griseus; identical to SEQ ID NO: 1601

SEQ ID NO: 5244 - DNA, 477 bp, Cricetulus griseus
gattatgatcaaggggggcgtgtggaggaataccgaggatgagagggtgaaagcagcggtaatgaaatatgggaaaaaccacaggtctaagattgcctcattgctgcataggaaatcggcaaagcagtgcaaagccagatggtatgaatggctggatccaagcattaaaaaaactgagtggtctagagaagaggaagaaaaactgttacacttggccaagctgatgccaacgcagaggaggaccattgctccaatcattggaagaacagcagccccatgttcggagcactatgaattcctcctggacaaaactgcccaaagggaccatgaggaggaaacaacagatgacccccgaaagcttaaaacctggagaaatagacccaattccagacacaaaaccacctcggcctgaccccattgatatggatgaagaagaacctgaaacgctttcttaagcttcgacccccccgtggttaa

SEQ ID NO: 5245 - DNA, 580 bp, Cricetulus griseus; identical to SEQ ID NO: 1603

SEQ ID NO: 5246 - DNA, 581 bp, Cricetulus griseus; identical to SEQ ID NO: 1604
  misc_feature (283)..(324): n is a, c, g, or t

SEQ ID NO: 5247 - DNA, 569 bp, Cricetulus griseus; identical to SEQ ID NO: 1605
  misc_feature (29)..(47): n is a, c, g, or t
  misc_feature (84)..(129): n is a, c, g, or t
  misc_feature (162)..(288): n is a, c, g, or t
  misc_feature (301)..(381): n is a, c, g, or t
  misc_feature (383)..(441): n is a, c, g, or t
  misc_feature (449)..(486): n is a, c, g, or t
  misc_feature (500)..(524): n is a, c, g, or t

SEQ ID NO: 5248 - DNA, 580 bp, Cricetulus griseus; identical to SEQ ID NO: 1606
  misc_feature (122)..(137): n is a, c, g, or t
  misc_feature (139)..(161): n is a, c, g, or t

SEQ ID NO: 5249 - DNA, 579 bp, Cricetulus griseus; identical to SEQ ID NO: 1607
  misc_feature (305)..(345): n is a, c, g, or t
  misc_feature (365)..(380): n is a, c, g, or t

SEQ ID NO: 5250 - DNA, 579 bp, Cricetulus griseus; identical to SEQ ID NO: 1608
  misc_feature (44)..(77): n is a, c, g, or t
  misc_feature (515)..(537): n is a, c, g, or t

SEQ ID NO: 5251 - DNA, 488 bp, Cricetulus griseus
  misc_feature (28)..(84): n is a, c, g, or t
  misc_feature (88)..(106): n is a, c, g, or t
  misc_feature (123)..(186): n is a, c, g, or t
  misc_feature (189)..(231): n is a, c, g, or t
  misc_feature (233)..(247): n is a, c, g, or t
  misc_feature (249)..(265): n is a, c, g, or t
gtccctttttagtgaagggttaattgcnnnnnnnnnnnnnnnnnnnnnnnnnnnnnnnnnnnnnnnnnnnnnnnnnnnnnnnnnattnnnnnnnnnnnnnnnnnnnctatacattacgcgtgnnnnnnnnnnnnnnnnnnnnnnnnnnnnnnnnnnnnnnnnnnnnnnnnnnnnnnnnnnnnnnnnatnnnnnnnnnnnnnnnnnnnnnnnnnnnnnnnnnnnnnnnnnnngnnnnnnnnnnnnnnnannnnnnnnnnnnnnnnncgttaatacactattatagaaacccgaaacgtggggtttggccctctatttcgcagtattaccaccccttttttgggcttgtacctcccagaggggaattacttttttgggggcccacgaacaattaacctttttcacctttcccttatattggcccccccttaaaaaaaaatctggggggggttctttgggaaaaaacccccctaaccccgcttttgggatt

SEQ ID NO: 5252 - DNA, 579 bp, Cricetulus griseus; identical to SEQ ID NO: 1610
  misc_feature (528)..(528): n is a, c, g, or t

SEQ ID NO: 5253 - DNA, 567 bp, Cricetulus griseus; identical to SEQ ID NO: 1611
  misc_feature (385)..(403): n is a, c, g, or t

SEQ ID NO: 5254 - DNA, 580 bp, Cricetulus griseus; identical to SEQ ID NO: 1612

SEQ ID NO: 5255 - DNA, 566 bp, Cricetulus griseus; identical to SEQ ID NO: 1613

SEQ ID NO: 5256 - DNA, 581 bp, Cricetulus griseus; identical to SEQ ID NO: 1614

SEQ ID NO: 5257 - DNA, 578 bp, Cricetulus griseus; identical to SEQ ID NO: 1615

SEQ ID NO: 5258 - DNA, 580 bp, Cricetulus griseus; identical to SEQ ID NO: 1616

SEQ ID NO: 5259 - DNA, 578 bp, Cricetulus griseus; identical to SEQ ID NO: 1617
  misc_feature (181)..(208): n is a, c, g, or t

SEQ ID NO: 5260 - DNA, 578 bp, Cricetulus griseus; identical to SEQ ID NO: 1618

SEQ ID NO: 5261 - DNA, 566 bp, Cricetulus griseus; identical to SEQ ID NO: 1619

SEQ ID NO: 5262 - DNA, 580 bp, Cricetulus griseus; identical to SEQ ID NO: 1620
  misc_feature (527)..(527): n is a, c, g, or t
  misc_feature (545)..(545): n is a, c, g, or t

SEQ ID NO: 5263 - DNA, 578 bp, Cricetulus griseus; identical to SEQ ID NO: 1621

SEQ ID NO: 5264 - DNA, 578 bp, Cricetulus griseus; identical to SEQ ID NO: 1622

SEQ ID NO: 5265 - DNA, 579 bp, Cricetulus griseus; identical to SEQ ID NO: 1623

SEQ ID NO: 5266 - DNA, 235 bp, Cricetulus griseus; identical to SEQ ID NO: 1624

SEQ ID NO: 5267 - DNA, 579 bp, Cricetulus griseus; identical to SEQ ID NO: 1625
  misc_feature (280)..(299): n is a, c, g, or t

SEQ ID NO: 5268 - DNA, 579 bp, Cricetulus griseus
  misc_feature (281)..(300): n is a, c, g, or t
tcatacaacttaatgaagctggaatcactgctaattacataaaagctgtatgtttatgccaaagcctatgcaattcatatggaattcttgtcacacaaataagaaacaaatgacatgcttgataaaataagaaaataagctgatatgtgagtgatgaagactccataggggggatccatgtttgtttgtttttttaagacttatttattatttatacagtggtctgcctgtaggccagaagaggacaccagatcattatggatggttgtgagtcaccatgnnnnnnnnnnnnnnnnnnnntaaggacctttggaagagcagccagtgcttttaacctctgagctgtctctccagtctaaattcacatgtttgctccagttgttaaagtaattttaagctatgcaatctcctctgtcttcctccaggtggacctctgtatcagtgctctaaccatgcccaggtcctacaaattcctctgctcactcgcgttattgggtcccccattgtctcacttaggctttctattgttgtgatgaaacatcatgaccatagcaactcttataaagggaaatatttaat

SEQ ID NO: 5269 - DNA, 578 bp, Cricetulus griseus; identical to SEQ ID NO: 1627
  misc_feature (275)..(298): n is a, c, g, or t
  misc_feature (303)..(335): n is a, c, g, or t
  misc_feature (436)..(456): n is a, c, g, or t
  misc_feature (463)..(482): n is a, c, g, or t

SEQ ID NO: 5270 - DNA, 493 bp, Cricetulus griseus; identical to SEQ ID NO: 1628

SEQ ID NO: 5271 - DNA, 577 bp, Cricetulus griseus; identical to SEQ ID NO: 1629

SEQ ID NO: 5272 - DNA, 317 bp, Cricetulus griseus; identical to SEQ ID NO: 1630

SEQ ID NO: 5273 - DNA, 579 bp, Cricetulus griseus; identical to SEQ ID NO: 1631

SEQ ID NO: 5274 - DNA, 579 bp, Cricetulus griseus; identical to SEQ ID NO: 1632

SEQ ID NO: 5275 - DNA, 580 bp, Cricetulus griseus; identical to SEQ ID NO: 1633
  misc_feature (180)..(202): n is a, c, g, or t

SEQ ID NO: 5276 - DNA, 470 bp, Cricetulus griseus; identical to SEQ ID NO: 1634
  misc_feature (285)..(285): n is a, c, g, or t

SEQ ID NO: 5277 - DNA, 579 bp, Cricetulus griseus; identical to SEQ ID NO: 1635

SEQ ID NO: 5278 - DNA, 578 bp, Cricetulus griseus; identical to SEQ ID NO: 1636

SEQ ID NO: 5279 - DNA, 312 bp, Cricetulus griseus; identical to SEQ ID NO: 1637

SEQ ID NO: 5280 - DNA, 291 bp, Cricetulus griseus; identical to SEQ ID NO: 1638
  misc_feature (72)..(87): n is a, c, g, or t

SEQ ID NO: 5281 - DNA, 578 bp, Cricetulus griseus; identical to SEQ ID NO: 1639

SEQ ID NO: 5282 - DNA, 566 bp, Cricetulus griseus; identical to SEQ ID NO: 1640
  misc_feature (484)..(500): n is a, c, g, or t

SEQ ID NO: 5283 - DNA, 578 bp, Cricetulus griseus; identical to SEQ ID NO: 1641

SEQ ID NO: 5284 - DNA, 188 bp, Cricetulus griseus; identical to SEQ ID NO: 1642

SEQ ID NO: 5285 - DNA, 579 bp, Cricetulus griseus; identical to SEQ ID NO: 1643
  misc_feature (399)..(418): n is a, c, g, or t

SEQ ID NO: 5286 - DNA, 577 bp, Cricetulus griseus; identical to SEQ ID NO: 1644
  misc_feature (196)..(215): n is a, c, g, or t

SEQ ID NO: 5287 - DNA, 360 bp, Cricetulus griseus
tggcttccgttaccgtcctccccgtgtgagacaaccccccaccctaccccaccccaccccaccccgagaccgtgtcctttgtttataaaccacacttggtttttccggccggtttgctgccccgctgaggtggacaggcgctagtgtaatggcggggagtcttccttgggtggcaagcaggatcctgtggggcctgacgcccttggcgagctttataagcttctcgcagggagtcccgctgctgacccgcgtcaggctcacccttccgtcccccatagtgttggattgctgggacgagaagagggctctgtttggagtatatgacaacttcggaattctggggaatttcgataagctccc

SEQ ID NO: 5288 - DNA, 484 bp, Cricetulus griseus
  misc_feature (96)..(123): n is a, c, g, or t
  misc_feature (157)..(184): n is a, c, g, or t
  misc_feature (232)..(276): n is a, c, g, or t
agggggtggggaatagtatgaccaagatgacaacttgaacaaacaaattatttttctaattcattgttctgatgctagaatattctgtatcactgnnnnnnnnnnnnnnnnnnnnnnnnnnnngtttggttttggttttggttttggtttttcgaannnnnnnnnnnnnnnnnnnnnnnnnnnnatgtcctggcgctcgctctggaaaccaggctggcttcgaactcacaannnnnnnnnnnnnnnnnnnnnnnnnnnnnnnnnnnnnnnnnnnnncgccaccaacgcccagcttgtatcattggattttaatgaaacagaaaacattgaaaagttctctttaaaggacacaactgggctctgcagataaaatataactcactatctttaatatgaaaaatcaatagaattaccattgaaatttcttccacaactcaaaaataaaatttatgcaatggtatttaaaaatttctgcattaaacat

SEQ ID NO: 5289 - DNA, 545 bp, Cricetulus griseus; identical to SEQ ID NO: 1647

SEQ ID NO: 5290 - DNA, 579 bp, Cricetulus griseus; identical to SEQ ID NO: 1648

SEQ ID NO: 5291 - DNA, 161 bp, Cricetulus griseus; identical to SEQ ID NO: 1649

SEQ ID NO: 5292 - DNA, 579 bp, Cricetulus griseus; identical to SEQ ID NO: 1650

SEQ ID NO: 5293 - DNA, 579 bp, Cricetulus griseus; identical to SEQ ID NO: 1651

SEQ ID NO: 5294 - DNA, 580 bp, Cricetulus griseus; identical to SEQ ID NO: 1652
  misc_feature (513)..(513): n is a, c, g, or t

SEQ ID NO: 5295 - DNA, 86 bp, Cricetulus griseus
ttcgataggtatacattcaaatcctatcgcaattctggtgttagcagcatgctaagccgcactaggctaggccctacttgtactag

SEQ ID NO: 5296 - DNA, 579 bp, Cricetulus griseus; identical to SEQ ID NO: 1654

SEQ ID NO: 5297 - DNA, 579 bp, Cricetulus griseus; identical to SEQ ID NO: 1655
  misc_feature (76)..(94): n is a, c, g, or t
  misc_feature (274)..(293): n is a, c, g, or t
  misc_feature (486)..(486): n is a, c, g, or t

SEQ ID NO: 5298 - DNA, 184 bp, Cricetulus griseus
acgacaagacgcaaatactgcagccctacaggcaacgggatattatttcattgagtacgtgggctttgttatagtaataacaagcctgcgcctagttacaatttctgatacacaatcaaatcttatatcataaaacaaaagcctcattcctttactatgcttacttgtagcagcaaccagtaaa

SEQ ID NO: 5299 - DNA, 579 bp, Cricetulus griseus; identical to SEQ ID NO: 1657

SEQ ID NO: 5300 - DNA, 120 bp, Cricetulus griseus
tcatcatttattatattagcttttctgacttccaccccttatactactagctatccaaattcctatttttaaatattcccacttcatcaaagaacctgttcccgctgtactaatcactcc

SEQ ID NO: 5301 - DNA, 579 bp, Cricetulus griseus; identical to SEQ ID NO: 1659

SEQ ID NO: 5302 - DNA, 545 bp, Cricetulus griseus; identical to SEQ ID NO: 1660
  misc_feature (297)..(331): n is a, c, g, or t
  misc_feature (333)..(345): n is a, c, g, or t
  misc_feature (376)..(376): n is a, c, g, or t

SEQ ID NO: 5303 - DNA, 578 bp, Cricetulus griseus; identical to SEQ ID NO: 1661

SEQ ID NO: 5304 - DNA, 538 bp, Cricetulus griseus
  misc_feature (506)..(506): n is a, c, g, or t
acagaaggatagtactttctgttccgagtggtagagaagactgtcaccaggggttgtggctttcacctgccagatcccaagacaccaggtctctacgcttccacctttcttaaccgtgccttggattgcttatctgttttatataaatagagtaaatattatagtatataattctaacaactcacattcaggccactgtaaaagcttaatttcaaactggttttcattgtttcagagagtaaatatttactatatgttactatatattacaacacaaaacttttacctagggccagcaagctgactcaatggataaaggtgcttgctaccccacctgacgacatgtgctccatccccagtccccatattggaaggagacatccaactcctgcaagttgtcctttgacctccacgtgtgcttagtgacacacacaagtgtgtactcgggcacacacgcacgcgctcgcgctctcactagtcctcattcacatatcacacacttcttntattataaattatgtctcctctcatgtggtga

SEQ ID NO: 5305 - DNA, 578 bp, Cricetulus griseus; identical to SEQ ID NO: 1663

SEQ ID NO: 5306 - DNA, 579 bp, Cricetulus griseus; identical to SEQ ID NO: 1664
  misc_feature (418)..(418): n is a, c, g, or t

SEQ ID NO: 5307 - DNA, 579 bp, Cricetulus griseus; identical to SEQ ID NO: 1665

SEQ ID NO: 5308 - DNA, 579 bp, Cricetulus griseus; identical to SEQ ID NO: 1666

SEQ ID NO: 5309 - DNA, 344 bp, Cricetulus griseus; identical to SEQ ID NO: 1667
  misc_feature (36)..(36): n is a, c, g, or t

SEQ ID NO: 5310 - DNA, 579 bp, Cricetulus griseus; identical to SEQ ID NO: 1668
  misc_feature (116)..(130): n is a, c, g, or t

SEQ ID NO: 5311 - DNA, 578 bp, Cricetulus griseus; identical to SEQ ID NO: 1669

SEQ ID NO: 5312 - DNA, 580 bp, Cricetulus griseus; identical to SEQ ID NO: 1670
  misc_feature (177)..(220): n is a, c, g, or t

SEQ ID NO: 5313 - DNA, 578 bp, Cricetulus griseus; identical to SEQ ID NO: 1671

SEQ ID NO: 5314 - DNA, 507 bp, Cricetulus griseus
  misc_feature (398)..(416): n is a, c, g, or t
  misc_feature (436)..(453): n is a, c, g, or t
caaggcagagctcttggtccccagactgatagctgggataccagcacgggactgatccagacctcaggaacttgggtcaatgaggaggccttggaaatcatggggccttctgtagtagatcagtacttctctgtagcataggtgtggactttgggagcccatcccacacggagggatagtccctgagccaagacacatggggggggacctaggccctatcccaaaggatatgatagactctgatgaccccctatggaaagcctcaccctccccggggagcagcaaggatatgtgataggtagagttttatttgggagggtggtacgggaggaggagagggagagggaactgggattcacatgtaaaacaatcttgtttctaattccaataaaaaactnnnnnnnnnnnnnnnnnnncggccgcccccggggggacnnnnnnnnnnnnnnnnnncttaagagggttatttgcgcccttggcgaattaatgggaataacgtgttccctg

SEQ ID NO: 5315 - DNA, 518 bp, Cricetulus griseus
aaatctgttctattttcattactactgaagttgaacctagtaatcattggccatttgtatctggcctgtgtgaatggtatgttcatattctgtgttcattatttcactagaatgtttttcattatttttaattctgtgtgtgtttctgtctgtctctttaggagtgcatgtgtatatgagtgtgggtacctgcagaggccagaggtagatgctcttggagctacagatatggacagttgtaaatggcctcacatgagtgttgaaaactgaacacaggtctactgcaagagcagcaagtgctcttagctgctaagccatctctccagacccccaaaatacttctttttaagtgggtctataagaaaccagggccttgaactttctagagccactgaactgaatacctaacctttgtaagaactcttaatatattaaggattttaactctttgtcatggtgcagatattttccctacactatcatgttttttgatactgcttctactatataaaatctca

SEQ ID NO: 5316 - DNA, 566 bp, Cricetulus griseus; identical to SEQ ID NO: 1674

SEQ ID NO: 5317 - DNA, 577 bp, Cricetulus griseus
aatgtgagaactccggagtggaggaccaacatgcagaagatgcagacgctggggagagcccgcccttaggtgccatcccaataacggactgcttattttgttcccatcactcaagctccctcatgaagaatgtggctcatatgactaaaatccacagcttctttattcctgatattgaatacctctcagatctgaaaggactgattaaatatttgggagagaaagttggtgttggcaagatttgcttgtggtgcaacgagaaagggaaatccttctactccacagaagctgtgcaggcacacatgactgacaaaagccactgtaagctcttcacagatggtgacgctgctttggaatttgcagacttctatgattttaggagtagctacccacattacaaggaggggcaggaccctaatgaaattgatcagttgtcctcggataagactttggaatgcgatgatgaaaccatggagctgatacttccttctggtgccagagtgggtcatcgctccttgatgagatactacaaacaacgatttggcttgccaagagctgtaacagttgctagaaacca

SEQ ID NO: 5318 - DNA, 578 bp, Cricetulus griseus; identical to SEQ ID NO: 1676
  misc_feature (318)..(338): n is a, c, g, or t
  misc_feature (455)..(455): n is a, c, g, or t
  misc_feature (524)..(524): n is a, c, g, or t

SEQ ID NO: 5319 - DNA, 579 bp, Cricetulus griseus; identical to SEQ ID NO: 1677
  misc_feature (184)..(184): n is a, c, g, or t
  misc_feature (188)..(189): n is a, c, g, or t
  misc_feature (204)..(204): n is a, c, g, or t
  misc_feature (216)..(216): n is a, c, g, or t

SEQ ID NO: 5320 - DNA, 522 bp, Cricetulus griseus; identical to SEQ ID NO: 1678

SEQ ID NO: 5321 - DNA, 574 bp, Cricetulus griseus; identical to SEQ ID NO: 1679

SEQ ID NO: 5322 - DNA, 578 bp, Cricetulus griseus; identical to SEQ ID NO: 1680

SEQ ID NO: 5323 - DNA, 578 bp, Cricetulus griseus; identical to SEQ ID NO: 1681

SEQ ID NO: 5324 - DNA, 578 bp, Cricetulus griseus; identical to SEQ ID NO: 1682
  misc_feature (81)..(99): n is a, c, g, or t
  misc_feature (144)..(162): n is a, c, g, or t

SEQ ID NO: 5325 - DNA, 570 bp, Cricetulus griseus
  misc_feature (168)..(184): n is a, c, g, or t
  misc_feature (250)..(295): n is a, c, g, or t
gagaaagtagcagtctcagattcagagagtgtttctttgtcaggttcccccaaatccagccccacctctgccagtgcctgtggtacacaagggctcagacagccagggtccaaatatccagatattgcctcacctacgtttcgaaggttgtttggtgccaaggcaggnnnnnnnnnnnnnnnnncacctaatactgagggtgtgaaatcctcctcagtattgcccagccctagtacctcattagcgcgannnnnnnnnnnnnnnnnnnnnnnnnnnnnnnnnnnnnnnnnnnnnngtgctggtgggctgagcggcaacagcagccctctcttcaataagccctcagacctaactacagatgttataagcttaagtcactccttggcttccagcccagcatcggttcactctttcacatcgggtggtcttgtgtgggctgccaatctgagcagttcctctgccggcagcaaggacactccgagttaccagtccatgactagtctccatacgagctctgagtcaattgacctgcccctcagccatcatggctcgctgtctggactgaccaca

SEQ ID NO: 5326 - DNA, 569 bp, Cricetulus griseus; identical to SEQ ID NO: 1684

SEQ ID NO: 5327 - DNA, 572 bp, Cricetulus griseus; identical to SEQ ID NO: 1685

SEQ ID NO: 5328 - DNA, 464 bp, Cricetulus griseus; identical to SEQ ID NO: 1686
  misc_feature (372)..(394): n is a, c, g, or t
  misc_feature (396)..(424): n is a, c, g, or t

SEQ ID NO: 5329 - DNA, 458 bp, Cricetulus griseus
atgcagttactgttgaagacacaatcggacttaaatactatggaagatgatgaccctcagacttcttacatggtttcagcgtgggctagaatgtgtaaaattcttggaaaagactttcagcagtatcttccactggttatcgagcctcttattaagactgcctcagctaaacctgatgttgctctcttagacacacaagatgtggagaacatgagtgatgatgatggctggcaatttgtaaatcttggagaccagcaaagctttggaattaaaacctcatgacttgaagcaaaagcaactgcttgtcagatgttggtttactatgctaaggagttaagagaaggatttgtggactatacagaacaagttgtgaagctgatggttcctttgttgaaattttattttcacgaccatgttcgagtggcagctgcggaagccatgccctttctcttggaatg

SEQ ID NO: 5330 - DNA, 578 bp, Cricetulus griseus; identical to SEQ ID NO: 1688
  misc_feature (67)..(109): n is a, c, g, or t

SEQ ID NO: 5331 - DNA, 579 bp, Cricetulus griseus; identical to SEQ ID NO: 1689
  misc_feature (79)..(97): n is a, c, g, or t
  misc_feature (409)..(439): n is a, c, g, or t
  misc_feature (552)..(552): n is a, c, g, or t

SEQ ID NO: 5332 - DNA, 579 bp, Cricetulus griseus
  misc_feature (28)..(28): n is a, c, g, or t
  misc_feature (141)..(171): n is a, c, g, or t
  misc_feature (483)..(501): n is a, c, g, or t
agagggactgtccgaaaaaaatccggtncagctgcctttggggggggatatatttcccccaggaaacaattatgcccctggtttcgccgagggcgctattaaccctctgtaaagggaacaaaaggtggggatcccccgggnnnnnnnnnnnnnnnnnnnnnnnnnnnnnnntgggcaaatctttaatggttcatgaaacacattccaccaatgacgtgagaaatcactgacaagcgcatgtacaccagtaaatgcctcccaatcttttccatagacagcactcagtaaatcttggaataggtggctgaatttctgtttctaattcagtagattaaaaacacaagtgtgagtggtataaagatagaagaattatgttatgataaactcaatcacaaaaatagagaatccagaccctttccagctaacttatattacctgtttctcaagttacacacggtggccaaagacaaaatagtaattatnnnnnnnnnnnnnnnnnnnaagtagtgtaaacgctaggattcaaatattagatggtcaatgggcttaaatcaagtgactttagaaacaacatttaac

SEQ ID NO: 5333 - DNA, 579 bp, Cricetulus griseus; identical to SEQ ID NO: 1691
  misc_feature (49)..(63): n is a, c, g, or t

SEQ ID NO: 5334 - DNA, 350 bp, Cricetulus griseus
  misc_feature (110)..(140): n is a, c, g, or t
  misc_feature (142)..(220): n is a, c, g, or t
  misc_feature (237)..(298): n is a, c, g, or t
caggccgccacctgagtgacaactgcatctatcgttccctttacagaaggttatatgatcgctcggagtattcaatgtcataactgacacctgtgagactttgatatacnnnnnnnnnnnnnnnnnnnnnnnnnnnnnnnannnnnnnnnnnnnnnnnnnnnnnnnnnnnnnnnnnnnnnnnnnnnnnnnnnnnnnnnnnnnnnnnnnnnnnnnnnnnnntatatttccacttgtcnnnnnnnnnnnnnnnnnnnnnnnnnnnnnnnnnnnnnnnnnnnnnnnnnnnnnnnnnnnnnnaaaactaattactaagcaaataataggcatttcactcacctaaaagacgaac

SEQ ID NO: 5335 - DNA, 473 bp, Cricetulus griseus; identical to SEQ ID NO: 1693

SEQ ID NO: 5336 - DNA, 579 bp, Cricetulus griseus; identical to SEQ ID NO: 1694
  misc_feature (174)..(196): n is a, c, g, or t

SEQ ID NO: 5337 - DNA, 186 bp, Cricetulus griseus
aggttcaactatgtgtacattagccaactttccacacacatatgtatttaaaaacatgatcctgaatgcttgacagagtcaattgccaatagtagcagttgttaaaattttatattgattgatgtaaactaatcttgaaagatccagccatgatctgttttaaaattaattgtaagagcaaccatt

SEQ ID NO: 5338 - DNA, 579 bp, Cricetulus griseus; identical to SEQ ID NO: 1696

SEQ ID NO: 5339 - DNA, 534 bp, Cricetulus griseus; identical to SEQ ID NO: 1697

SEQ ID NO: 5340 - DNA, 179 bp, Cricetulus griseus; identical to SEQ ID NO: 1698

SEQ ID NO: 5341 - DNA, 582 bp, Cricetulus griseus; identical to SEQ ID NO: 1699
  misc_feature (282)..(329): n is a, c, g, or t

SEQ ID NO: 5342 - DNA, 387 bp, Cricetulus griseus; identical to SEQ ID NO: 1700
  misc_feature (247)..(265): n is a, c, g, or t

SEQ ID NO: 5343 - DNA, 121 bp, Cricetulus griseus
agcctgaagaattaaaatgccaacaccaaaccttacattaacagctctggtccatactactcccatgcatttctaatatattatttgttttataaccacttctaaaattcctgcttcctcc

SEQ ID NO: 5344 - DNA, 558 bp, Cricetulus griseus; identical to SEQ ID NO: 1702
  misc_feature (470)..(470): n is a, c, g, or t

SEQ ID NO: 5345 - DNA, 580 bp, Cricetulus griseus; identical to SEQ ID NO: 1703

SEQ ID NO: 5346 - DNA, 579 bp, Cricetulus griseus; identical to SEQ ID NO: 1704
  misc_feature (458)..(458): n is a, c, g, or t
  misc_feature (536)..(536): n is a, c, g, or t

SEQ ID NO: 5347 - DNA, 579 bp, Cricetulus griseus; identical to SEQ ID NO: 1705

SEQ ID NO: 5348 - DNA, 578 bp, Cricetulus griseus; identical to SEQ ID NO: 1706

SEQ ID NO: 5349 - DNA, 567 bp, Cricetulus griseus; identical to SEQ ID NO: 1707

SEQ ID NO: 5350 - DNA, 579 bp, Cricetulus griseus; identical to SEQ ID NO: 1708

SEQ ID NO: 5351 - DNA, 580 bp, Cricetulus griseus; identical to SEQ ID NO: 1709

SEQ ID NO: 5352 - DNA, 130 bp, Cricetulus griseus
  misc_feature (51)..(79): n is a, c, g, or t
  misc_feature (81)..(94): n is a, c, g, or t
gatgaattaatgtgacaccacacagcgtcttaatcaatactttagctatannnnnnnnnnnnnnnnnnnnnnnnnnnnngnnnnnnnnnnnnnntacattccatattgatccactatctccatcatcaat

SEQ ID NO: 5353 - DNA, 582 bp, Cricetulus griseus; identical to SEQ ID NO: 1711

SEQ ID NO: 5354 - DNA, 524 bp, Cricetulus griseus; identical to SEQ ID NO: 1712

SEQ ID NO: 5355 - DNA, 579 bp, Cricetulus griseus; identical to SEQ ID NO: 1713

SEQ ID NO: 5356 - DNA, 381 bp, Cricetulus griseus; identical to SEQ ID NO: 1714

SEQ ID NO: 5357 - DNA, 511 bp, Cricetulus griseus
ggagccgctgggcatagaggtcgaccagttcctggaagacgtgcggctgcaggagcgcgccaccggtggcttgttggccgaggcccccaatgaaaagctcttcttcgtggacactggatccaagaaaaaagaaccaaacaagaggacctgggtccagaagaagtctcagcgtctccagaaaccccttcgggttgaccttgcccttgagaatccttctaaggtccctgctcccaaagacatcctcgcacaccaggtccccaatgccaagaagctcaggcgaaaggagcagctatgggagaaactggcgaagcagggtgagctgcccagggaggtgcgcaaggcacaggcccggctcctcagccctcctgcaccaaaggccaaacgcgggctacaggacatcattgagcggcccttctatgacctctggaacccaaacaaccctctggacaagccgttggccggtcaggatgcattttttctggagcataccaagaagaaaggagtgaggcgg

SEQ ID NO: 5358 - DNA, 578 bp, Cricetulus griseus; identical to SEQ ID NO: 1716
  misc_feature (84)..(110): n is a, c, g, or t

SEQ ID NO: 5359 - DNA, 496 bp, Cricetulus griseus; identical to SEQ ID NO: 1717
  misc_feature (105)..(119): n is a, c, g, or t

SEQ ID NO: 5360 - DNA, 542 bp, Cricetulus griseus; identical to SEQ ID NO: 1718

SEQ ID NO: 5361 - DNA, 473 bp, Cricetulus griseus; identical to SEQ ID NO: 1719

SEQ ID NO: 5362 - DNA, 524 bp, Cricetulus griseus; identical to SEQ ID NO: 1720
  misc_feature (96)..(127): n is a, c, g, or t

SEQ ID NO: 5363 - DNA, 503 bp, Cricetulus griseus; identical to SEQ ID NO: 1721
  misc_feature (44)..(68): n is a, c, g, or t

SEQ ID NO: 5364 - DNA, 580 bp, Cricetulus griseus; identical to SEQ ID NO: 1722

SEQ ID NO: 5365 - DNA, 561 bp, Cricetulus griseus; identical to SEQ ID NO: 1723

SEQ ID NO: 5366 - DNA, 410 bp, Cricetulus griseus; identical to SEQ ID NO: 1724

SEQ ID NO: 5367 - DNA, 472 bp, Cricetulus griseus
  misc_feature (333)..(353): n is a, c, g, or t
taatggctctcatttgaagactgtggcgttgtctagagccacactgcctagtccgtgtcccctgcagacagcaatgcccagtctgttggacctttaactcatcctcctgggcagagagattgctggctttatggtcccagctgactagggaacagctcatttggggacacactggggcacacaagctcctaagtggtactctgacaaatgctacttggctttagaaaagtgggtttttctatctgactttataatgtcactgaagtgggaaatataatttcttaatttctttttgcaaatacagggtttttctgtttggttgggtttctgtgnnnnnnnnnnnnnnnnnnnnnagacagagtttctctgtgtaacagttctgggtgtcctgggactcactctatagaccaagctggcctcggactcacagaaatctgcctgcctgtctcccaagggttgggattaaaggtgt

SEQ ID NO: 5368 - DNA, 112 bp, Cricetulus griseus; identical to SEQ ID NO: 1726
  misc_feature (40)..(59): n is a, c, g, or t

SEQ ID NO: 5369 - DNA, 137 bp, Cricetulus griseus; identical to SEQ ID NO: 1727

SEQ ID NO: 5370 - DNA, 318 bp, Cricetulus griseus; identical to SEQ ID NO: 1728

SEQ ID NO: 5371 - DNA, 518 bp, Cricetulus griseus
  misc_feature (255)..(370): n is a, c, g, or t
cggcggggaccgaggcacatgaggacccggcgtggaccgcggagatgttgggcgtggcggccggaatgaccaacagcaacatggccaatgccttggccagcgctacatgtgagcgctgcaaggggggctttgcacctgcggagaggatgggtgaacagtaatggtgagctgtaccatgagcagtgcttcgtgtgtgctcagtgcttccagcagttcccagaaggactcttctatgagtttgagggaaggaagtannnnnnnnnnnnnnnnnnnnnnnnnnnnnnnnnnnnnnnnnnnnnnnnnnnnnnnnnnnnnnnnnnnnnnnnnnnnnnnnnnnnnnnnnnnnnnnnnnnnnnnnnnnnnnnnnnnngtgacctctgccaggaagtgctggcagacatagggtttgtcaagaatgccggcagacacctgtgtcgtccttgtcataatcgtgaaaaggccagaggccttggaaaatacatctgccagaaatgccatgccatcattgatgaacaacc

SEQ ID NO: 5372 - DNA, 267 bp, Cricetulus griseus; identical to SEQ ID NO: 1730
  misc_feature (211)..(225): n is a, c, g, or t

SEQ ID NO: 5373 - DNA, 396 bp, Cricetulus griseus
cttacagccatagctgatgaccctaatgggggagtagaggaaattatggaagtttggggctggggtcaccatgaggactacagtgaggagtgtcaccaaggctgagtttttcctgatgaaatgagatggaggggtcaggaatgctggctactttctgatacccatgtatttcctcgggggcaggctagctctgaggagccctgctggcctgtcctctgactctctgtggtaccatcaacagctttaaggagtatactagtcacatgtgtggccttttgaagctctgaacctctttgggagctacagacttgaagctcttacaggcatctgggagcccagctgagcccttcctaccagatagtcccatgccccactccagatccaagttcctcagca

SEQ ID NO: 5374 - DNA, 534 bp, Cricetulus griseus; identical to SEQ ID NO: 1732

SEQ ID NO: 5375 - DNA, 554 bp, Cricetulus griseus; identical to SEQ ID NO: 1733

SEQ ID NO: 5376 - DNA, 580 bp, Cricetulus griseus; identical to SEQ ID NO: 1734

SEQ ID NO: 5377 - DNA, 578 bp, Cricetulus griseus; identical to SEQ ID NO: 1735

SEQ ID NO: 5378 - DNA, 458 bp, Cricetulus griseus; identical to SEQ ID NO: 1736
  misc_feature (207)..(236): n is a, c, g, or t

SEQ ID NO: 5379 - DNA, 579 bp, Cricetulus griseus; identical to SEQ ID NO: 1737
  misc_feature (75)..(103): n is a, c, g, or t

SEQ ID NO: 5380 - DNA, 579 bp, Cricetulus griseus; identical to SEQ ID NO: 1738
  misc_feature (442)..(477): n is a, c, g, or t
  misc_feature (484)..(519): n is a, c, g, or t

SEQ ID NO: 5381 - DNA, 579 bp, Cricetulus griseus; identical to SEQ ID NO: 1739

SEQ ID NO: 5382 - DNA, 569 bp, Cricetulus griseus; identical to SEQ ID NO: 1740

SEQ ID NO: 5383 - DNA, 580 bp, Cricetulus griseus; identical to SEQ ID NO: 1741
  misc_feature (521)..(541): n is a, c, g, or t

SEQ ID NO: 5384 - DNA, 581 bp, Cricetulus griseus; identical to SEQ ID NO: 1742
  misc_feature (396)..(425): n is a, c, g, or t

SEQ ID NO: 5385 - DNA, 581 bp, Cricetulus griseus
  misc_feature (157)..(186): n is a, c, g, or t
aaactggggactggagagatgactcactgtgaagagccctggctgcaggttgggcagtggtggcacatgcatttaattccagcattttgggaggcagaggcatgcagatctctgtgagtttgaggtcagcatagtctacagaacgagttataggacnnnnnnnnnnnnnnnnnnnnnnnnnnnnnntgaaagacaaaaaacaaataaaaacaacagagccctggctgttcctccagatgatgatgagttacgttttaggtcacatggaggcttacagctgcctacaacttcagtcccagaggatccaatgccctcttatggcctccactggcactaggcacacacagatatacatgcaggacacattaaaaacatccatacacattaaaaacaaacattcgggacatcatgttggaatgagaagaaaggaacgcttgtgactggaaatttcaagtttatctccaaggtatcccttatccatttcatttcctttctgttttcagtcattgacactactttggtgccaggctccattatctcttgctttcctgctaaggacccagtcacaccgatctttaccc

SEQ ID NO: 5386 - DNA, 528 bp, Cricetulus griseus; identical to SEQ ID NO: 1744
  misc_feature (477)..(493): n is a, c, g, or t

SEQ ID NO: 5387 - DNA, 540 bp, Cricetulus griseus; identical to SEQ ID NO: 1745

SEQ ID NO: 5388 - DNA, 551 bp, Cricetulus griseus
gcgccccgcggtgcagatcccctccccctcccgttttcctcctccctccctccctcagccttgctctgggacgctggggagggggctgagcccgggtgcagagaactcatctgggtttccgagaatggtaaatacggctggccgtctctggaaaggccactgatctgcctcatgtaaagtatgctcagttcctttccagtggttttgctggaaaccatgtctcactatacagatgaacccagatttaccatagaacagatagatctactccaacgtcttcggcgtactgggatgaccaaacatgaaattctccatgcattagaaactttggaccgtcttgatcaagaacatagtgataagtttggaaggaggtccagctacgggggaagctcatatgggaacagtaccaacaatgttccagcatcttcctctacagccacagcttccacgcagacccagcactccggaatgtccccatcacccagcaacagttatgatacctccccacagccttgcactaccaatcaaaatgggagggagaacaacgatcg

SEQ ID NO: 5389 - DNA, 576 bp, Cricetulus griseus; identical to SEQ ID NO: 1747
  misc_feature (280)..(299): n is a, c, g, or t

SEQ ID NO: 5390 - DNA, 580 bp, Cricetulus griseus; identical to SEQ ID NO: 1748

SEQ ID NO: 5391 - DNA, 578 bp, Cricetulus griseus; identical to SEQ ID NO: 1749

SEQ ID NO: 5392 - DNA, 554 bp, Cricetulus griseus
  misc_feature (56)..(81): n is a, c, g, or t
  misc_feature (405)..(419): n is a, c, g, or t
ccagcctggtctacatagctacttagctagtttcaggacagccagggctacacaannnnnnnnnnnnnnnnnnnnnnnnnnctctttaacagcacagtgcattcacagccacagtgtggggtgactttcaccacactttatacccagaccacttcattgtccccagaaaaagttacatattctctaaaaagtcatttctcatttttcagccccctcaaggcaccaacctgctggcctactgcctcgatcaactgtgcctgatctgggtgcctctatcaacaataatgtgtggccttttgtatctgattcctttcacttggaacagcattaatgaaacttttccatactgtaggaggaatcagtacctctttagtttttatgactgaacataaaacattccactgnnnnnnnnnnnnnnnccatagaaaaaacgctaatgatgatgaggcaggaggatcatgagttcagaccaacctgagatattttaacaaatgcatagacatattctactacaggaatatatccacatttttctccttaacaactgatgaaat

SEQ ID NO: 5393 - DNA, 579 bp, Cricetulus griseus; identical to SEQ ID NO: 1751
  misc_feature (450)..(476): n is a, c, g, or t

SEQ ID NO: 5394 - DNA, 579 bp, Cricetulus griseus; identical to SEQ ID NO: 1752

SEQ ID NO: 5395 - DNA, 569 bp, Cricetulus griseus; identical to SEQ ID NO: 1753

SEQ ID NO: 5396 - DNA, 579 bp, Cricetulus griseus; identical to SEQ ID NO: 1754

SEQ ID NO: 5397 - DNA, 570 bp, Cricetulus griseus; identical to SEQ ID NO: 1755

SEQ ID NO: 5398 - DNA, 578 bp, Cricetulus griseus; identical to SEQ ID NO: 1756

SEQ ID NO: 5399 - DNA, 579 bp, Cricetulus griseus; identical to SEQ ID NO: 1757

SEQ ID NO: 5400 - DNA, 579 bp, Cricetulus griseus; identical to SEQ ID NO: 1758

SEQ ID NO: 5401 - DNA, 77 bp, Cricetulus griseus
ttctacaaactcttctaatcccaacattttcagcaaacgagcttatactattttatattttatttgaagccacactt

SEQ ID NO: 5402 - DNA, 348 bp, Cricetulus griseus
  misc_feature (47)..(82): n is a, c, g, or t
cattctaaccactgcaatatataaggagaaacacagtacttacttannnnnnnnnnnnnnnnnnnnnnnnnnnnnnnnnnnnaattttatccagtaattttatgatgactattggttaaacttttaagacctttttgttgacaatatgttacataactaggaaaattatgcaaaattaatctgaacaaattaaggcttgataatttttaaattttctgtttgcaacatatggttgcaatcattcccagaaagtgctttttcctggcacctactatgcacttggccatctctagatgaagctgaataattccttcctagcctgcagctggcagaaattcatggaagtag

SEQ ID NO: 5403 - DNA, 510 bp, Cricetulus griseus
gcacctgaactcttgccatctgactgtcaccagtttggggaggaaaagaggcctctcctaagaatgtccccagctctggaaatcatgctcccctcacttgtaataatcagctaaggaatcctgaaccaagtgaggaacaaaggctcatgaggccgggactcccttcactgtctttctcaaaattgggttgttaagaacaaaaccaggcaggaccagtggcgcccgtgctcagaagggtcctcccggcagcttgacactgactggttctccgtctccgtgttgatttggggagaaatcaattttgtcttgggattttgtatgttataggaatccttagagaatgtgattccttctgatggggagacagggcaaattattttaatgttttgtattttcacctttataaagatgaaatcctcaggggtgaagaactggttgcataattttctgaatttcaggcactttgtgctgtatgaagacccggatatttaagccttttgggtagtaagg

SEQ ID NO: 5404 - DNA, 567 bp, Cricetulus griseus; identical to SEQ ID NO: 1762

SEQ ID NO: 5405 - DNA, 119 bp, Cricetulus griseus; identical to SEQ ID NO: 1763

SEQ ID NO: 5406 - DNA, 580 bp, Cricetulus griseus; identical to SEQ ID NO: 1764
  misc_feature (276)..(297): n is a, c, g, or t

SEQ ID NO: 5407 - DNA, 460 bp, Cricetulus griseus; identical to SEQ ID NO: 1765

SEQ ID NO: 5408 - DNA, 491 bp, Cricetulus griseus; identical to SEQ ID NO: 1766

SEQ ID NO: 5409 - DNA, 579 bp, Cricetulus griseus; identical to SEQ ID NO: 1767

SEQ ID NO: 5410 - DNA, 546 bp, Cricetulus griseus
  misc_feature (475)..(508): n is a, c, g, or t
cattgaccttcactttgctgtccctctactgtccttgccacagccccgacgctgctgatagcacgtctttcgatgtccagttaggagatatcatcctgacagcgacagacgggcattgctggtccctgtgctcacttcacccacacaccttccagccaacagtgggctcagagaaggttctcttgcggctatcaccagtgggaaatctactcagttccaataggaaagtgaggggagagcagagaacaagctctctcaactccatgcgttaaggaaactctaacctcaaataaacaacctagtacctggtgaagatggagccacatgttggggaaagaagcatgggtgtggtgtggacagaatacagatagaaggtgtttcaactaaaatggtcagggactggactctggggaaagtgggagctgaagggaccagctgggagaaggcaatctgtgggaaggtgacggcatgtgcnnnnnnnnnnnnnnnnnnnnnnnnnnnnnnnnnncccaaactaaaagcaggcaaggtcaggcgttggtgggg

SEQ ID NO: 5411 - DNA, 579 bp, Cricetulus griseus; identical to SEQ ID NO: 1769
  misc_feature (85)..(114): n is a, c, g, or t

SEQ ID NO: 5412 - DNA, 580 bp, Cricetulus griseus; identical to SEQ ID NO: 1770

SEQ ID NO: 5413 - DNA, 579 bp, Cricetulus griseus; identical to SEQ ID NO: 1771

SEQ ID NO: 5414 - DNA, 578 bp, Cricetulus griseus; identical to SEQ ID NO: 1772

SEQ ID NO: 5415 - DNA, 580 bp, Cricetulus griseus; identical to SEQ ID NO: 1773
  misc_feature (75)..(113): n is a, c, g, or t
  misc_feature (216)..(231): n is a, c, g, or t
  misc_feature (548)..(548): n is a, c, g, or t

SEQ ID NO: 5416 - DNA, 435 bp, Cricetulus griseus; identical to SEQ ID NO: 1774

SEQ ID NO: 5417 - DNA, 582 bp, Cricetulus griseus; identical to SEQ ID NO: 1775
  misc_feature (263)..(280): n is a, c, g, or t

SEQ ID NO: 5418 - DNA, 567 bp, Cricetulus griseus; identical to SEQ ID NO: 1776

SEQ ID NO: 5419 - DNA, 579 bp, Cricetulus griseus; identical to SEQ ID NO: 1777

SEQ ID NO: 5420 - DNA, 479 bp, Cricetulus griseus; identical to SEQ ID NO: 1778

SEQ ID NO: 5421 - DNA, 568 bp, Cricetulus griseus
  misc_feature (387)..(404): n is a, c, g, or t
  misc_feature (412)..(412): n is a, c, g, or t
tctatactttaattttaagaacttagagtaatagttcacaacttttaatttgtcttatgttttccattgctgttgtttattgtcatatcctattatttgccttcacctctgtcttaattagcttttcctttgctttgataaaacaccaggactaaaagcaacttggaaaggaaagggtttatttcacgttacagcttataattgatcactgagggaagtcaggacagaaacctggagatagaaactagagcagaagccatggaggaacattgtttactggtggcttggttagtctgctttcttacagcacccaaacccaccagcccaggagtggtactaccacagtgagctgggctcttctacatcagttgtcaatcaagaaaatgnnnnnnnnnnnnnnnnnnttgctcanaatggtttcttcccagatgatgactgagaagctaatttaaaaaaaaatggtgccaagtaccacaagagtaacagaactgtgctgttttctggaattttgttttttacttttttgttgttgtagtagtagttgttgtttgtttggggttttttttgg

SEQ ID NO: 5422 - DNA, 533 bp, Cricetulus griseus
gacccgaccctcagctggcggtcaccatgggcttcacagggttcgggaagaaagcccgaacatttgacttggaggccatgtttgagcaaactcgaaggacagctgtggaaagaagtcggaaaacactagaagcaagagaaaaagaggaagaaatgaacagagagaaagaattaagaaaacaaattgaagatgttgaaccaacaccatcaagctccagtgcaatcagagagcagtcaaaatcatcatccagggacacaagcagcagtgacagtgaagacagttctgattcatctgatgatgagttaattggccctcctttaccccctaaaacggtaggagaaccagttaacactgtggatgaagatatccttggccctttacctgcacccctcggtgaaggagacgaagatgatgatgatgacatagaggatgaaggagaagaagaaaaccccgtccaaagaattcctgactctcatgagataacactgaagcatggcactaaaacagtttctgctttgggtttggatccctca

SEQ ID NO: 5423 - DNA, 578 bp, Cricetulus griseus; identical to SEQ ID NO: 1781

SEQ ID NO: 5424 - DNA, 232 bp, Cricetulus griseus
ttaagacataaatattttcattaataatatataagctgaagtagctagaggtaaaaatgtactgatgtctgaaaccttgagattttccagtaagttgacagactgatggatgtacagatgtttagatatttaaagtaacaataaagagatatagaggaaggtcagttgctcaatctgtggtgatatttatgtgtgagttctctgtaaaaagttaactttggtatttataact

SEQ ID NO: 5425 - DNA, 110 bp, Cricetulus griseus; identical to SEQ ID NO: 1783

SEQ ID NO: 5426 - DNA, 579 bp, Cricetulus griseus; identical to SEQ ID NO: 1784

SEQ ID NO: 5427 - DNA, 500 bp, Cricetulus griseus
agcatagctgtgcctggcacatcaaacccccaacagcgccagctgcccagagcacagtctcagcactcatctcctggggaaatagcagcatctcctcaaggcttagacaacccagccctgctccgagacatgctgctggccaacccgcatgagctgtccttgctgaaggagcgtaacccacccttggcagaagctctgctcagtggagatctcgagagattctctcgggtcctggtagagcagcaacaggaccgagctcgaagagaacaagaaagaattcgtctattttctgctgacccctttgatctggaagctcaggcaaagatagaagaagatataaggcagcagaacatcgaggagaacatgacgatagctatggaggaggccccggagagcttcggccaggtcgccatgctctacatcaactgcagagtgaacgggcaccctgtgaaagccttcgttgactcaggtgcccagatgactattatgagccaggcttg

SEQ ID NO: 5428 - DNA, 579 bp, Cricetulus griseus; identical to SEQ ID NO: 1786
  misc_feature (496)..(496): n is a, c, g, or t

SEQ ID NO: 5429 - DNA, 577 bp, Cricetulus griseus; identical to SEQ ID NO: 1787
  misc_feature (228)..(283): n is a, c, g, or t

SEQ ID NO: 5430 - DNA, 579 bp, Cricetulus griseus; identical to SEQ ID NO: 1788
  misc_feature (441)..(458): n is a, c, g, or t

SEQ ID NO: 5431 - DNA, 122 bp, Cricetulus griseus
  misc_feature (56)..(75): n is a, c, g, or t
tgccggctgctgccctgctggtgccttgcccctgtgagggcactgggccagcccannnnnnnnnnnnnnnnnnnnaagaaccctttcttcaggtttggggcttacccttaaattccaggggc

SEQ ID NO: 5432 - DNA, 306 bp, Cricetulus griseus; identical to SEQ ID NO: 1790

SEQ ID NO: 5433 - DNA, 502 bp, Cricetulus griseus; identical to SEQ ID NO: 1791

SEQ ID NO: 5434 - DNA, 507 bp, Cricetulus griseus; identical to SEQ ID NO: 1792

SEQ ID NO: 5435 - DNA, 580 bp, Cricetulus griseus; identical to SEQ ID NO: 1793
  misc_feature (126)..(140): n is a, c, g, or t

SEQ ID NO: 5436 - DNA, 469 bp, Cricetulus griseus; identical to SEQ ID NO: 1794

SEQ ID NO: 5437 - DNA, 411 bp, Cricetulus griseus; identical to SEQ ID NO: 1795

SEQ ID NO: 5438 - DNA, 562 bp, Cricetulus griseus
ctcatatgctgctgcttgacaacccacacaaagaacccctccggttgcggtataagctgactttcaaccagggtgggcagccattcagcgaagtaggagaagtgaaagactttccagacctctctgtcttgaggactgcctaactcctcaaccgagactcttcagttacacttaggccagcgttcctttcactgtctggtcgggactcattgtgatgtgttgcagagtgccaagagttctcttctgatgtcagaccttgattgccaatctctgtagatcatgtgtgtgtgtgcgtgtgtgttattggggtgctgggggaggagggagagctgggcttgggatttgggtagtgtgggggatgctgacaatttctgagatcatctctgctgcactcatttctgcttctgcatgttggttgacactgttgtccctgcctcgggttggagttttatataagccaaagttttttccatgtattgttatcttttcattcatccactctgtgccttgtcagcctttgaaagtcttagttgctcccaggctgctattctcagggacctta

SEQ ID NO: 5439 - DNA, 556 bp, Cricetulus griseus; identical to SEQ ID NO: 1797

SEQ ID NO: 5440 - DNA, 459 bp, Cricetulus griseus; identical to SEQ ID NO: 1798

SEQ ID NO: 5441 - DNA, 580 bp, Cricetulus griseus; identical to SEQ ID NO: 1799
  misc_feature (61)..(79): n is a, c, g, or t
  misc_feature (156)..(175): n is a, c, g, or t
  misc_feature (521)..(540): n is a, c, g, or t

SEQ ID NO: 5442 - DNA, 533 bp, Cricetulus griseus; identical to SEQ ID NO: 1800
  misc_feature (28)..(80): n is a, c, g, or t

SEQ ID NO: 5443 - DNA, 461 bp, Cricetulus griseus; identical to SEQ ID NO: 1801

SEQ ID NO: 5444 - DNA, 578 bp, Cricetulus griseus; identical to SEQ ID NO: 1802

SEQ ID NO: 5445 - DNA, 508 bp, Cricetulus griseus; identical to SEQ ID NO: 1803

SEQ ID NO: 5446 - DNA, 518 bp, Cricetulus griseus
cgtccggtggttttaacagactcattgggaaacatgggcgacacatgcagccagctgagcttttgttttcaacggttgcaaaggccccagcagaataactgtccaagcagacaggaaggctgtgaggctgagttgagaagcagcaagaggccccaaggcaaggctgccaggcgggcacaccaccacagctctggttcctgccaccagccaaccataggcagggggaggctgtttcctgtgttactctagttgctcattttccctctaagagactggcgtgtctgacagcagccgttactgctcctctgcctctcccatcaaacaggaaaacttgacaatgtagcgctctttctgtaagagtttcccatagtaccacggttcttaaacgtccctcacttgagctccccctggaaagatcaaatggagccacctccagagtcacaaacgcttttgaccagtgcatccagggttcttgagtttcagctttatttcatgtgcaaaacttacagaacttccaa

SEQ ID NO: 5447 - DNA, 296 bp, Cricetulus griseus
atttttaacactttttttaataaaccttttttgggggggggggccccttcccaaatttaaaaatttttgagggcgggaaaaatactcaaaaggttaaaaccccggtttcccaaaaccccaaggtcaatttccaacccctttttggttcccaggggattgggtttccccccaaccttccttttgggcaaaaccccatggcccataaaaacccccctccccttgggccaaatttctaaacatttttgccaaaggccttaaaaaaaatccaacttactttcctttttggaaccctttaa

SEQ ID NO: 5448 - DNA, 530 bp, Cricetulus griseus
gaaccaactttttagttcggacttcatggatgagaatgccctcagcagcctctagtgtggttaaaagtgtacaaaagatgctgacatttttaaagatagaattttctaattcttttagtaaattgtgatagtatgaactgtgttgacttttgaaatttcttccttgtgatggaaatagtttttatttccatggaaagatgaccacatttgacagtttctgcattttttaatcagagtacagaattttatctatgactgctacgtatgtaagtatcaaactggaaatctgctgtactgtatactgatatttaatagactaataaatagctgtcttcagcattggaacaaatttctatacacatatacactgagggaataccatgacaatcaactttaagatcagaaggaagacttaagagtcattgagcatttagaaaatgacaatggaggaaaagttatttaagcatctacagacaagtttttgtcctaacatgggctaccttgggaccggagcacaacaacttgctaaa

SEQ ID NO: 5449 - DNA, 580 bp, Cricetulus griseus; identical to SEQ ID NO: 1807
  misc_feature (66)..(87): n is a, c, g, or t

SEQ ID NO: 5450 - DNA, 258 bp, Cricetulus griseus; identical to SEQ ID NO: 1808

SEQ ID NO: 5451 - DNA, 507 bp, Cricetulus griseus; identical to SEQ ID NO: 1809

SEQ ID NO: 5452 - DNA, 579 bp, Cricetulus griseus; identical to SEQ ID NO: 1810

SEQ ID NO: 5453 - DNA, 506 bp, Cricetulus griseus; identical to SEQ ID NO: 1811

SEQ ID NO: 5454 - DNA, 579 bp, Cricetulus griseus; identical to SEQ ID NO: 1812

SEQ ID NO: 5455 - DNA, 580 bp, Cricetulus griseus; identical to SEQ ID NO: 1813

SEQ ID NO: 5456 - DNA, 492 bp, Cricetulus griseus
attgaagaaaactgaaagcaagtttgagaatggttttaatagatgcacacatctatgttataccacggcaaggggtgtgtttgcctgagagatcctccactggcaccttccactgagtctacgtgaataaatcaaatagatttttgtgtgggacaagatgttgtcctgagtgtgggaaagcattgaagttacatcagcatatcacaaaaagtgggtgagcaggtgaacaaagatggagggggccggagcaagacaagatgtctctgagattgtggaatctgtccctgattgctgatgtggcacacagtcctccttggctccccattttatgtcactgcttgccccaattctggcaccatgcctggtatatacaagatgggaatatgtgttctaatgggatagggaaaaggattttaggtaataagatagtagggcttatggcaaaatcatgtatttagactgaaaaaaaggaaattataagcaaaggctgta

SEQ ID NO: 5457 - DNA, 578 bp, Cricetulus griseus; identical to SEQ ID NO: 1815
  misc_feature (71)..(85): n is a, c, g, or t
  misc_feature (533)..(533): n is a, c, g, or t

SEQ ID NO: 5458 - DNA, 580 bp, Cricetulus griseus; identical to SEQ ID NO: 1816

SEQ ID NO: 5459 - DNA, 566 bp, Cricetulus griseus; identical to SEQ ID NO: 1817
  misc_feature (334)..(354): n is a, c, g, or t

SEQ ID NO: 5460 - DNA, 338 bp, Cricetulus griseus
atttcttggggccagagtggcattatttttacaaggtacatgtgtcatatgtttgtttgcttgatgaaattctgaaaaacagtctaccaattgcagaaaatattacttttctatgtttttattcactggctcagaaagcttctcaaagggtctgtggtcatagtagcatgactgtatccattctgttgacagagatgaagttattcttgtatttgactggtagcaaaaactgggtcataaaaaaaggaaaagatcaattttgtctcactgtttcagtatgtttaaataataatttccatgtttgcataatgaggcccatttctgatagcttggagagc

SEQ ID NO: 5461 - DNA, 248 bp, Cricetulus griseus
taccagatgaagaggtttcactgggagcaggaccagatcgcacacatgaataactacattgccaggtttggccatggcattgccaatctggcctttataaaatcacatcaaagataaaacgctctacacaatgattccaacacaaataaattaaaggattgggtgaaaaaatggtgtttttttctttattttcccaaacccctaacccaaaaatttttataattcttccaaaactaaaccaagccttt

SEQ ID NO: 5462 - DNA, 575 bp, Cricetulus griseus
  misc_feature (459)..(459): n is a, c, g, or t
ctatgtgctggtgaagaagtggagcgaagccctcgtgctgtacgacaggggtctgaaatatgccgacgaggtcagtgctgatggcggagccttcaagaacagcctgaaggacctgcctgatgtgcaagagctcatcactcaagtgaggtcagagaagtgctcgctgcaggccgcagccatcctggatgcaaatgactcccatcaagcagagccctcctctcaagtcaaagacaataagcctctggttgaacggtttgagaccttttgcttggacccttccctcgtcaccaagcaagccagcctcgtgcactttccaccaggcttccagcccatcccttgcaagcctttgttttttgacctggccctcaaccatgtggccttcccaccccttgaggacaagttggagcagaagaccaagagtggcctcacaggatacatcaagggcatctttggattcangagctaaccatgctcttcctcaggggcagggagggcctgacttactctgtattgtgagacagacagcaagttcccaagcattaaatctaagtctgcaatggcaagggcagagctca

SEQ ID NO: 5463 - DNA, 329 bp, Cricetulus griseus; identical to SEQ ID NO: 1821

SEQ ID NO: 5464 - DNA, 383 bp, Cricetulus griseus; identical to SEQ ID NO: 1822

SEQ ID NO: 5465 - DNA, 578 bp, Cricetulus griseus; identical to SEQ ID NO: 1823

SEQ ID NO: 5466 - DNA, 580 bp, Cricetulus griseus; identical to SEQ ID NO: 1824
  misc_feature (64)..(79): n is a, c, g, or t

SEQ ID NO: 5467 - DNA, 511 bp, Cricetulus griseus; identical to SEQ ID NO: 1825

SEQ ID NO: 5468 - DNA, 483 bp, Cricetulus griseus
  misc_feature (225)..(254): n is a, c, g, or t
  misc_feature (410)..(455): n is a, c, g, or t
ttactcactgtatatctgcaaggccagaatgtgaaggcaagccacggaaaagatgctgctgttgagaccaagattgctgagtccttgagattcagagtgggctgtccgctgacttcaaccttggagagcacccctgacaatcctgaggcttcaccgggagctagagccagctaacatttccttgtttaaagactgcctttgatttttcccttgattccatgtatnnnnnnnnnnnnnnnnnnnnnnnnnnnnnngaatcaatgttggcaatacctagttctacttctcaaactggagcatcctcctctatatatttatatgtatgtgttctgtagtcctcctcatgtacctattgtgtattttttttcctaatatttaagcacatgccttttgtgttacacaatatatgnnnnnnnnnnnnnnnnnnnnnnnnnnnnnnnnnnnnnnnnnnnnnnctataatctgtggcaaatagagaaataa

SEQ ID NO: 5469 - DNA, 581 bp, Cricetulus griseus; identical to SEQ ID NO: 1827
  misc_feature (363)..(363): n is a, c, g, or t

SEQ ID NO: 5470 - DNA, 305 bp, Cricetulus griseus; identical to SEQ ID NO: 1828

SEQ ID NO: 5471 - DNA, 545 bp, Cricetulus griseus; identical to SEQ ID NO: 1829

SEQ ID NO: 5472 - DNA, 567 bp, Cricetulus griseus; identical to SEQ ID NO: 1830

SEQ ID NO: 5473 - DNA, 579 bp, Cricetulus griseus; identical to SEQ ID NO: 1831
  misc_feature (379)..(393): n is a, c, g, or t

SEQ ID NO: 5474 - DNA, 578 bp, Cricetulus griseus
  misc_feature (471)..(492): n is a, c, g, or t
  misc_feature (510)..(510): n is a, c, g, or t
aaaggcagtttctgtatggtagtgggaacagcttgctgttaattatggtaatgctgtaggtatcaagtatgtatgactgttaaaggggaaatagaaagcaacattttagagcactacccagtacaatccagagatcaagtggaggtaatggtggcctaaaagggcacttaagagatatggctgctgctcagagctgtgtacatgctactttcttttttttagaaaactcttttattattattattacgactatcattattattactttatgtgtatgagtgttttgcttgcatgtatgtctgtgcaccacgtgtgtgcctaatgcccttggaggtcaaaaagggcattggattccccagaattggaattacggaaagttgtttgtcaccatgtgggtacagacagcagtcttagctgctgagccatctctccagccccacataagatttccaacaggctgttttttgttcnnnnnnnnnnnnnnnnnnnnnntctttctacagagctcangctatcatggaactcactatgtagaccaggctggtctcaaactcaaagatccacctgtctctgcctcc

SEQ ID NO: 5475 - DNA, 600 bp, Cricetulus griseus
  misc_feature (69)..(69): n is a, c, g, or t
  misc_feature (87)..(108): n is a, c, g, or t
  misc_feature (579)..(579): n is a, c, g, or t
ggaggcagagacaggtggatctttgagtttgagaccagcctggtctacatagtgagttccatgatagcntgagctctgtagaaagannnnnnnnnnnnnnnnnnnnnngaacaaaaaacagcctgttggaaatcttatgtggggctggagagatggctcagcagctaagactgctgtctgtacccacatggtgacaaacaactttccgtaattccaattctggggaatccaatgccctttttgacctccaagggcattaggcacacacgtggtgcacagacatacatgcaagcaaaacactcatacacataaagtaataataatgatagtcgtaataataataataaaagagttttctaaaaaaaagaaagtagcatgtacacagctctgagcagcagccatatctcttaagtgcccttttaggccaccattacctccacttgatctctggattgtactgggtagtgctctaaaatgttgctttctatttcccctttaacagtcatacatacttgatacctacagcattaccataattaacagcaagctgttcccactaccatacagaaactgcctttnccccggagcgcgtgggtcgac

SEQ ID NO: 5476 - DNA, 309 bp, Cricetulus griseus
ggtgtctggccaaccaaatccgggagtggaggaggttgggaacatggctcagttaataaagctatggaaaaataaggatctgagtctggatcccagcacccatgacagtgctgagcaagtgtggaaccgatctgtaaccccattcttccagactgtggagggtctctgagataaactgggtagctaaactaaacaaaccggttcagatgagataccacatctctctatgaatgggatggagtaactgaggcagatatgtgatgtcaccctgtggcctctacctatgaatctacacacacactcataaca

SEQ ID NO: 5477 - DNA, 481 bp, Cricetulus griseus; identical to SEQ ID NO: 1835
  misc_feature (55)..(84): n is a, c, g, or t
  misc_feature (437)..(437): n is a, c, g, or t

SEQ ID NO: 5478 - DNA, 261 bp, Cricetulus griseus; identical to SEQ ID NO: 1836

SEQ ID NO: 5479 - DNA, 579 bp, Cricetulus griseus; identical to SEQ ID NO: 1837

SEQ ID NO: 5480 - DNA, 580 bp, Cricetulus griseus; identical to SEQ ID NO: 1838
  misc_feature (372)..(372): n is a, c, g, or t
  misc_feature (466)..(518): n is a, c, g, or t

SEQ ID NO: 5481 - DNA, 600 bp, Cricetulus griseus; identical to SEQ ID NO: 1839
  misc_feature (532)..(532): n is a, c, g, or t

SEQ ID NO: 5482 - DNA, 484 bp, Cricetulus griseus; identical to SEQ ID NO: 1840

SEQ ID NO: 5483 - DNA, 579 bp, Cricetulus griseus; identical to SEQ ID NO: 1841
  misc_feature (267)..(290): n is a, c, g, or t

SEQ ID NO: 5484 - DNA, 579 bp, Cricetulus griseus; identical to SEQ ID NO: 1842
  misc_feature (170)..(193): n is a, c, g, or t

SEQ ID NO: 5485 - DNA, 578 bp, Cricetulus griseus; identical to SEQ ID NO: 1843
  misc_feature (264)..(293): n is a, c, g, or t

SEQ ID NO: 5486 - DNA, 574 bp, Cricetulus griseus
  misc_feature (95)..(118): n is a, c, g, or t
  misc_feature (526)..(526): n is a, c, g, or t
atggctaccttggagggtgagaagcccctacctgtagagatggagaagaacagcaccccctctgagccagactctggccagggacctcctccatnnnnnnnnnnnnnnnnnnnnnnnnccaccaaggaagaggctgaagcccaggggcgtcagagatcatgagagcctgtagccaccaatgtttcaagaggagcccctgccccgttcctgctgctgtctgggtgctactggggaaactggccatggcctgcaaactgggaatccttttcccacccaacccactctcctccttcactcactttctcctttttaagcccacccttggagattggcttggccctcacttccaggtccctgtaccctgtgacctaagtcagggccatgtgccctggtatgaaatggggccattatatctccttagacttgtctcctaagactttgtgttggggtctggactgctgtttccacctctcaacacctctggccttctgcaggcattctaaacctttgggccgggttggggcangagtgcggtgatgaaatataaacttgagtgggtttctgagtggcatct

SEQ ID NO: 5487 - DNA, 494 bp, Cricetulus griseus; identical to SEQ ID NO: 1845
  misc_feature (134)..(150): n is a, c, g, or t
  misc_feature (380)..(442): n is a, c, g, or t

SEQ ID NO: 5488 - DNA, 580 bp, Cricetulus griseus; identical to SEQ ID NO: 1846

SEQ ID NO: 5489 - DNA, 581 bp, Cricetulus griseus; identical to SEQ ID NO: 1847
  misc_feature (210)..(270): n is a, c, g, or t

SEQ ID NO: 5490 - DNA, 579 bp, Cricetulus griseus
  misc_feature (213)..(213): n is a, c, g, or t
agtggttccacctacacaccctcagaggcaggcaatgcattggacttggaactgggagcagaagaggctgatgaagagagtgtaggtgcaggcagtgagggcaaggcagaggagaccagcaccatggaggaagacagggttccagtgatctgtatgtgatgaggaaaagtctcagcttcatccagcctcaaccagtgcctggacctgcctacntaaggagctccagagcctccccagatgctggctatatcctggcactgccaccatcctggcgctgcccaaggctatacctgcctagccctttggtttcagcctgtggatgtctacacacccatgcaggctcttactgcccgtgctgtggctggattaaacagcacagagcttgatagaaaagtgaccgctctgcaccaacaacagtctgccacagacaggacacctggaccacagagtttatttttgtatttcttattgggcctgtacactccagctctaagggccagtgacatgaagccctgttggcggtgcccagtgttttatgggttctggccttggaccagcccctggtgcccacttttgccc

SEQ ID NO: 5491 - DNA, 581 bp, Cricetulus griseus; identical to SEQ ID NO: 1849

SEQ ID NO: 5492 - DNA, 229 bp, Cricetulus griseus; identical to SEQ ID NO: 1850

SEQ ID NO: 5493 - DNA, 580 bp, Cricetulus griseus; identical to SEQ ID NO: 1851
  misc_feature (338)..(362): n is a, c, g, or t

SEQ ID NO: 5494 - DNA, 443 bp, Cricetulus griseus; identical to SEQ ID NO: 1852

SEQ ID NO: 5495 - DNA, 502 bp, Cricetulus griseus; identical to SEQ ID NO: 1853

SEQ ID NO: 5496 - DNA, 581 bp, Cricetulus griseus; identical to SEQ ID NO: 1854

SEQ ID NO: 5497 - DNA, 579 bp, Cricetulus griseus; identical to SEQ ID NO: 1855
  misc_feature (533)..(533): n is a, c, g, or t

SEQ ID NO: 5498 - DNA, 116 bp, Cricetulus griseus; identical to SEQ ID NO: 1856
  misc_feature (41)..(41): n is a, c, g, or t

SEQ ID NO: 5499 - DNA, 579 bp, Cricetulus griseus; identical to SEQ ID NO: 1857
  misc_feature (310)..(351): n is a, c, g, or t
  misc_feature (486)..(486): n is a, c, g, or t
  misc_feature (492)..(537): n is a, c, g, or t
  misc_feature (544)..(544): n is a, c, g, or t

SEQ ID NO: 5500 - DNA, 511 bp, Cricetulus griseus; identical to SEQ ID NO: 1858
  misc_feature (205)..(219): n is a, c, g, or t

SEQ ID NO: 5501 - DNA, 481 bp, Cricetulus griseus; identical to SEQ ID NO: 1859
  misc_feature (410)..(440): n is a, c, g, or t

SEQ ID NO: 5502 - DNA, 579 bp, Cricetulus griseus; identical to SEQ ID NO: 1860
  misc_feature (485)..(485): n is a, c, g, or t

SEQ ID NO: 5503 - DNA, 522 bp, Cricetulus griseus; identical to SEQ ID NO: 1861

SEQ ID NO: 5504 - DNA, 555 bp, Cricetulus griseus; identical to SEQ ID NO: 1862

SEQ ID NO: 5505 - DNA, 581 bp, Cricetulus griseus; identical to SEQ ID NO: 1863

SEQ ID NO: 5506 - DNA, 579 bp, Cricetulus griseus; identical to SEQ ID NO: 1864

SEQ ID NO: 5507 - DNA, 568 bp, Cricetulus griseus; identical to SEQ ID NO: 1865

SEQ ID NO: 5508 - DNA, 600 bp, Cricetulus griseus
  misc_feature (41)..(75): n is a, c, g, or t
  misc_feature (85)..(157): n is a, c, g, or t
  misc_feature (174)..(422): n is a, c, g, or t
  misc_feature (428)..(480): n is a, c, g, or t
  misc_feature (507)..(530): n is a, c, g, or t
acccacgcgggcgggcgtcctcattagagtgacatggtgtnnnnnnnnnnnnnnnnnnnnnnnnnnnnnnnnnnnggatgcccannnnnnnnnnnnnnnnnnnnnnnnnnnnnnnnnnnnnnnnnnnnnnnnnnnnnnnnnnnnnnnnnnnnnnnnngctgtagtgtgggagcnnnnnnnnnnnnnnnnnnnnnnnnnnnnnnnnnnnnnnnnnnnnnnnnnnnnnnnnnnnnnnnnnnnnnnnnnnnnnnnnnnnnnnnnnnnnnnnnnnnnnnnnnnnnnnnnnnnnnnnnnnnnnnnnnnnnnnnnnnnnnnnnnnnnnnnnnnnnnnnnnnnnnnnnnnnnnnnnnnnnnnnnnnnnnnnnnnnnnnnnnnnnnnnnnnnnnnnnnnnnnnnnnnnnnnnnnnnnnnnnnnnnnnnnntgccannnnnnnnnnnnnnnnnnnnnnnnnnnnnnnnnnnnnnnnnnnnnnnnnnnnnaagacctctttcttccaggctttgggnnnnnnnnnnnnnnnnnnnnnnnncaccatcgaaattctaagcgatgtgcagctgataaaaactggagacatagcaggagccagcgaaccccac

SEQ ID NO: 5509 - DNA, 525 bp, Cricetulus griseus; identical to SEQ ID NO: 1867
  misc_feature (49)..(49): n is a, c, g, or t
  misc_feature (89)..(89): n is a, c, g, or t

SEQ ID NO: 5510 - DNA, 578 bp, Cricetulus griseus; identical to SEQ ID NO: 1868
  misc_feature (491)..(509): n is a, c, g, or t

SEQ ID NO: 5511 - DNA, 578 bp, Cricetulus griseus; identical to SEQ ID NO: 1869

SEQ ID NO: 5512 - DNA, 580 bp, Cricetulus griseus; identical to SEQ ID NO: 1870

SEQ ID NO: 5513 - DNA, 579 bp, Cricetulus griseus; identical to SEQ ID NO: 1871
  misc_feature (458)..(473): n is a, c, g, or t

SEQ ID NO: 5514 - DNA, 507 bp, Cricetulus griseus; identical to SEQ ID NO: 1872

SEQ ID NO: 5515 - DNA, 196 bp, Cricetulus griseus; identical to SEQ ID NO: 1873

SEQ ID NO: 5516 - DNA, 510 bp, Cricetulus griseus; identical to SEQ ID NO: 1874
  misc_feature (160)..(178): n is a, c, g, or t

SEQ ID NO: 5517 - DNA, 584 bp, Cricetulus griseus
  misc_feature (35)..(35): n is a, c, g, or t
  misc_feature (42)..(42): n is a, c, g, or t
  misc_feature (47)..(48): n is a, c, g, or t
  misc_feature (57)..(57): n is a, c, g, or t
  misc_feature (80)..(100): n is a, c, g, or t
gtacgggccagtgaatcgcgccgtaatacgaactncactatnagggnncgaattggngtaccgggccccccccttcgagnnnnnnnnnnnnnnnnnnnnntggtccaagaactctggtgtggtcctgagaaagagcaaggtggaaaaatctgcctttgaattttctgagactgaatctatgcttaaaattgcagaaaatactgggagggccctatgtgtgggggcagtacgatctattggttctgcccccatgcttcccttacggcggaatggagaacccttgtcttacatttgtgactcctactctactggcaggtgacaagtcactctccaatgttattgcacatgaaatatcccatatctggacaggaaacctattgactaacaaaacctgggatcacttttggttaaatgaaggacatactgtctatttatagcgtcacatttgtggacgattgtttggggagaagttcaaacatttccatgctttgggaggatggggagagctacagaatacgacaaaaacttttggggagtctcatccctttaccaaactggtggtggatctgaaggatgtagaccca

SEQ ID NO: 5518 - DNA, 581 bp, Cricetulus griseus; identical to SEQ ID NO: 1876

SEQ ID NO: 5519 - DNA, 314 bp, Cricetulus griseus
  misc_feature (133)..(133): n is a, c, g, or t
gacttggggttccggccctttaattccaacattcccttatttcaccctccaactttttcggttggaggctttaaaggttaaaagccagtaaaatgtgacttgaatgggggtgctaagtggcctctcgttcccntccatggaagaaccaatgtgaccccagtcatcccccatccctcccccttctcctttattgctgtaaatatataaatatgtcaggttaaagggaaaggtttccagggctcttttctcccctctgccccaaaacctacctctacccctccccatagccagccagggcagattctctgcctggg

SEQ ID NO: 5520 - DNA, 196 bp, Cricetulus griseus; identical to SEQ ID NO: 1878
  misc_feature (30)..(54): n is a, c, g, or t

SEQ ID NO: 5521 - DNA, 63 bp, Cricetulus griseus
cctctaggtcgacccacgcgtgcggtgtgcgatgacagccctgagctccaagttgatctctga

SEQ ID NO: 5522 - DNA, 579 bp, Cricetulus griseus; identical to SEQ ID NO: 1880

SEQ ID NO: 5523 - DNA, 575 bp, Cricetulus griseus
  misc_feature (509)..(574): n is a, c, g, or t
tttgtaccaaggccatgcaggctaggagtccagagtgggcactgcaggaatggacaagagtgcactgggcttaggtctgccctttctctctggtggtctgcaggccctacaggctgccagtctgcagtgggacttgggagctttctcttcagattccagtgggcctctcagcttgatcccgaaggaagagatgggctctgccctgaaaagtggttatgtcttgaaggctctggatgggtaggccaccagcctgggcactggggcagaaaccatggtgctggagcctggcacagtgcactggataagaccaaatcgccggttctaagtgtgggtgggaggcgtgtcagtgtgtcctgcgatgggtccggtgtcactgtttacatgacctatttgtgtggttatatagccctttatttaaaagagaagttccttttacgaagttattaaattatatgtttaagagctaaaaagaaaaaaaagctgcagagtatttataaaattgtcttaannnnnnnnnnnnnnnnnnnnnnnnnnnnnnnnnnnnnnnnnnnnnnnnnnnnnnnnnnnnnnnnnnt

SEQ ID NO: 5524 - DNA, 415 bp, Cricetulus griseus
  misc_feature (59)..(81): n is a, c, g, or t
  misc_feature (92)..(105): n is a, c, g, or t
  misc_feature (107)..(141): n is a, c, g, or t
  misc_feature (251)..(283): n is a, c, g, or t
  misc_feature (300)..(319): n is a, c, g, or t
caagatccaggataaagagggcatcccccccgaccagcagcgactcatctttgccggcnnnnnnnnnnnnnnnnnnnnnnntctttctgatnnnnnnnnnnnnnnannnnnnnnnnnnnnnnnnnnnnnnnnnnnnnnnnngtggctattaattcttcagtctgcattcccagtgggcaatggatggcattaatctgcactatagccatttgccccaatttaagtttagaaaatccaagtttcagtaatannnnnnnnnnnnnnnnnnnnnnnnnnnnnnnnnttgttgcatggtaagcnnnnnnnnnnnnnnnnnnnncgccccccccgcgggggacccccacctttggtccccttaagggagggtaattggccccctgggggaaaccagggcataagcggttccctgggagaa

SEQ ID NO: 5525 - DNA, 579 bp, Cricetulus griseus; identical to SEQ ID NO: 1883

SEQ ID NO: 5526 - DNA, 567 bp, Cricetulus griseus; identical to SEQ ID NO: 1884

SEQ ID NO: 5527 - DNA, 599 bp, Cricetulus griseus; identical to SEQ ID NO: 1885
  misc_feature (26)..(71): n is a, c, g, or t

SEQ ID NO: 5528 - DNA, 310 bp, Cricetulus griseus
aaagcagtgggctgagacagggcagagctgcccactgctgctggcacctgtcaatctcaatgaatgctactctgctttcctacattctggatgtcaggaacaggtcttgaaggaacttcagaactgcacagaggacatgtcactgcgagacggcctttaaaagtacaaaatctaaagctctaaatgtacggatcaatttctcaattctggacatacacaatgaactactaaaactaatatactctgacgacaatattgacagatatgaaaccatgaccacaggtattaaaaaccatcagaatacaaactg

SEQ ID NO: 5529 - DNA, 314 bp, Cricetulus griseus; identical to SEQ ID NO: 1887

SEQ ID NO: 5530 - DNA, 579 bp, Cricetulus griseus
gaattccaaaatatgactatactaattgcagttataagccaaaaagacttaaaagacatgaaacagactcttggagataacattaccgtgcaaatgtattctccatcctggcctaactttgactatactatggtggttatttttgtaattgctgtgttcactgtggcattaggaggatactggagtggactcattgaattggaaaacatgaagtcagtgacagatgctgacgagaaagagacgaggagaaagaaggacgagtatttgactttcagccctcttacagttgtcgcatttgtggtcatctgctgtgtaatgatcgtcttactctatttcttctacaagtggcttgtttatgttatgatagcaattttctgcatagcgtcagcagtgagtctgtacaactgtcttgctgcattggttgataggatgccatgtggacagtgcacgatttcctgtttcggcaaaaatattaaagtgatcctgattttcctctctggactgtgcatctctgtcgctgttgtgtgggctgtgtttagaaatgaagatagatgggcttggattttacaagatatctta

SEQ ID NO: 5531 - DNA, 581 bp, Cricetulus griseus; identical to SEQ ID NO: 1889

SEQ ID NO: 5532 - DNA, 494 bp, Cricetulus griseus
ttggtgctcagaaccagggaatgcaacacaaagaccatcgagtgctgctcatatttacgaaagcaaacactacttgatagaatcttagcacaatttcctcatctgcttaatttcttccaacaaaacaggggagctaattcaaaatttccttttccctctcaagcacttttgaaatttccagagacctctctgatcagggggtgtttttagagccttttgatgtgtgtttaatctacatggcctgcttttagtgactacagtgacactgagcctctgtggggaggagtgcactttaattctttaatcctcaccttgcgtggccttatgagatactgggtcaggaaacccatttcattcttatctgccaaagagatactcagaagcacatcaaacatcagcacttcatctacacaaaaggatgagactttggtgtcactgaatatactcctttaacagtgactgctatgccatttggaaatgttttttaacctcag

SEQ ID NO: 5533 - DNA, 579 bp, Cricetulus griseus; identical to SEQ ID NO: 1891

SEQ ID NO: 5534 - DNA, 513 bp, Cricetulus griseus; identical to SEQ ID NO: 1892

SEQ ID NO: 5535 - DNA, 494 bp, Cricetulus griseus
atgtccagtcattgttagatgcagcaaatcagtaccagattgaacctgtgaagaaaatgtgtgttgattttttgaaggaacaggtggacgcatcaaattgtcttggtataagtgtgcttgcagagtgtctggactgtcctgaactgaaagcaacagcagatgactttattcaccagcattttaccgaagtttacaaaactgatgaatttctacaacttgatgtcaaacgagtaacccagcttcttatccaggacactctgactgtgagagcagaggaccaggtttatgacgctgcagtgaggtggttaaaatacgatgagcctaatcgccagccatttatggttgatatccttgctaaagtcagatttgctcttatatcgaagaatttcctaagtaaaacagtacaagctgaaccacttattcaagacaatccggaatgccttaaaatggtgataagcggaatgagggaccatctactggctgctgaagatcga

SEQ ID NO: 5536 - DNA, 500 bp, Cricetulus griseus
gtccatccttgggactgaaggaatcctcagtaatccagaaggagctgatagcaattaatgctaacagcacctgaatcacaagctaggagtagcattgttcctgtcaccctatctctagggaggaagaaacagaagatgcggggggcggccggtctgtattctatacaaatgggtgagctcccgattcggtgagcgaccatctcaaaaaacaagatagagaacacttgaggaaggaaccgttatcaccttctgtccttcacacagcgcacgcgcatgcacttaggtttaaatttgtttttacagttgtttgttgtgtgtggggggggtagatatggaggtcagaggacaacttggtcgagtcagttctcttctaccacgtggattgtgaccacaaactcatgttgtcaggctggggaccggagaggaggttactaaagatgggtggctgggtgtgaagagatcaaatttagaatgactggtccccggacttcttagagtgg

SEQ ID NO: 5537 - DNA, 470 bp, Cricetulus griseus
atgggacgactgcgggtcattgcacataatatgcgggcgcaggcgctgtctggcttagcttccccactgggagtgggtggaaatgaccagactatttagtaattggggtccgggggccattcccttctttctcctgagggaagggtggtgttggcatgctggaagataggggctgtgtggagtgaatgctgacaaagggtaaaggaggacttgggagacagagaaagtagtggaaagtctcatttctggaaggagaaaaggaaatcccctaaaagcaaagcagtcagaaaaatcagggggactgttaagggctttgctcagcattccaagcagtgaatgtaagtgactcccttgagcctaagtaaaattactagtacagaaacacagacatggtggggccattgaagggctttttttaactgtttcttgaactctgccattcctgaagtggggggaagaagctcttggat

SEQ ID NO: 5538 - DNA, 507 bp, Cricetulus griseus; identical to SEQ ID NO: 1896

SEQ ID NO: 5539 - DNA, 392 bp, Cricetulus griseus; identical to SEQ ID NO: 1897
  misc_feature (148)..(241): n is a, c, g, or t

SEQ ID NO: 5540 - DNA, 468 bp, Cricetulus griseus; identical to SEQ ID NO: 1898
  misc_feature (42)..(80): n is a, c, g, or t
  misc_feature (240)..(281): n is a, c, g, or t

SEQ ID NO: 5541 - DNA, 567 bp, Cricetulus griseus; identical to SEQ ID NO: 1899
  misc_feature (415)..(432): n is a, c, g, or t
  misc_feature (534)..(534): n is a, c, g, or t

SEQ ID NO: 5542 - DNA, 568 bp, Cricetulus griseus; identical to SEQ ID NO: 1900

SEQ ID NO: 5543 - DNA, 519 bp, Cricetulus griseus
cgcgtgcgctcagggtgaggccatgggctccgtgcccgagttttactccaagaggaggcactacgatgcacagccctccaactcgctggaccaatatggattacgattgggcatgtggtactggaaagatgaaaccaaaactctggaatttagaagtgggacgcctgcagtagagctcaaggataaaggcaagaaagggaaggcggttcacttcgctgaaatggacggtccggcttctgaaaggttgacagataaaaggtttccctcaagggacgaaaagtcactgaaagtcttggagaaacgatatcagctgggcaatatcacgctggatgatgtcaagtttgttgctttgcttttcctccaagacactgaaatgcagcgggtctgttctttcacaacatttatgagagagaaaatatcagatactcaaaaagactggaaattctttgagtccttttatactttctgtacatgcatcgcttggattgtcttccgacgtcagtacctgacagagatcga

SEQ ID NO: 5544 - DNA, 581 bp, Cricetulus griseus; identical to SEQ ID NO: 1902

SEQ ID NO: 5545 - DNA, 579 bp, Cricetulus griseus; identical to SEQ ID NO: 1903

SEQ ID NO: 5546 - DNA, 460 bp, Cricetulus griseus; identical to SEQ ID NO: 1904
  misc_feature (126)..(126): n is a, c, g, or t

SEQ ID NO: 5547 - DNA, 582 bp, Cricetulus griseus; identical to SEQ ID NO: 1905

SEQ ID NO: 5548 - DNA, 583 bp, Cricetulus griseus; identical to SEQ ID NO: 1906
  misc_feature (526)..(551): n is a, c, g, or t

SEQ ID NO: 5549 - DNA, 580 bp, Cricetulus griseus; identical to SEQ ID NO: 1907

SEQ ID NO: 5550 - DNA, 582 bp, Cricetulus griseus; identical to SEQ ID NO: 1908
  misc_feature (231)..(253): n is a, c, g, or t
  misc_feature (301)..(368): n is a, c, g, or t
  misc_feature (370)..(383): n is a, c, g, or t
  misc_feature (392)..(415): n is a, c, g, or t
  misc_feature (500)..(519): n is a, c, g, or t

SEQ ID NO: 5551 - DNA, 581 bp, Cricetulus griseus; identical to SEQ ID NO: 1909

SEQ ID NO: 5552 - DNA, 556 bp, Cricetulus griseus
  misc_feature (155)..(174): n is a, c, g, or t
  misc_feature (436)..(459): n is a, c, g, or t
ttaatttactatttccctaaatgaactgtaatgtcatgtataatacactttctgtatttttcactgtgcttagtgtccaacaaagtgctgactcacataaaaaaaaaaaaacagcagcaacaacccacatacccccagacaaaacctccaggggnnnnnnnnnnnnnnnnnnnnacaacagtcaaaacaatcaccttttgtctccctcctgtttgatgaaaagtctataaatggaatttatcacagcttctccaaatttattttaatatatggggaaaaaaaaagttctataaaataagttccaaaaaaaaatatagggactggggatatggatctttttttaaaatgaaaacttcagtttgatacacagcctaaaaaacagggtgtagggcatggcttaaattatagtgccaagggagtagagacagtcaaaatnnnnnnnnnnnnnnnnnnnnnnnntttgcctaacaattaaatcatgccctctgtgagagactctgtttgactcattctggcaaaacaaggtgaacactgtctgaggaaaacatttaaatta

SEQ ID NO: 5553 - DNA, 347 bp, Cricetulus griseus; identical to SEQ ID NO: 1911

SEQ ID NO: 5554 - DNA, 347 bp, Cricetulus griseus
ctgagcacagtgtacctggccacttttgctgtgtggactattgaatacagggcggagcacaacaattttggagcctgcacatgcattaacaccccagcaagttttgtattttgaaattcagcccatttttaaaaagctaagtacaatagcagctagcagactagttaccaagaaaccccccccccctggcagattttagtgaaactgcccttttgtgaatatgtttggcctaaagtcacattttaggaaaatcatttcgctcgggatccacctatttccctagtcccgccaagggcgcttttaacccttaataaagggcacaaaaggtggccctccccctcggtggc

SEQ ID NO: 5555 - DNA, 566 bp, Cricetulus griseus; identical to SEQ ID NO: 1913

SEQ ID NO: 5556 - DNA, 581 bp, Cricetulus griseus; identical to SEQ ID NO: 1914
  misc_feature (284)..(320): n is a, c, g, or t

SEQ ID NO: 5557 - DNA, 521 bp, Cricetulus griseus
  misc_feature (46)..(46): n is a, c, g, or t
  misc_feature (77)..(91): n is a, c, g, or t
cccccccttcgaggggtcgacccacggcgtgggcgggcaggaatgnagcaatcgctcattgtattcctcgatgaatnnnnnnnnnnnnnnngtctcgggtgcccactgactacagatctcagccccacgagtgttcgataccattttcattatgaagcgtatcagtctggtcaaagcagaattcatttcaaactgggaggcgggggtcattttcttgcgctggtgacacacgagttccattctggctacagtcttcagaggacatggaaaaatgctcaaaagacctggcacactgacacacctatctgctggaaatgagccatctcttacaaagcatggacgtcctacaccggacatactcagcgacatccatcaatgccatccagggtggagcttttgaaagtccgaatgaggaaaatcgactacacatgaggtggcggttcatatctattgccaaacattctaaaggaaccctgcaggtccctaaaccttttgctgacccagagagactacactcttct

SEQ ID NO: 5558 - DNA, 90 bp, Cricetulus griseus
tctagtcgacccacgcgtggggcgccgcgtccgatggcccataagttttggagtttaattgccgttttggtgatccagaatgccaagtga

SEQ ID NO: 5559 - DNA, 580 bp, Cricetulus griseus; identical to SEQ ID NO: 1917

SEQ ID NO: 5560 - DNA, 582 bp, Cricetulus griseus; identical to SEQ ID NO: 1918

SEQ ID NO: 5561 - DNA, 493 bp, Cricetulus griseus; identical to SEQ ID NO: 1919

SEQ ID NO: 5562 - DNA, 566 bp, Cricetulus griseus; identical to SEQ ID NO: 1920
  misc_feature (38)..(101): n is a, c, g, or t

SEQ ID NO: 5563 - DNA, 410 bp, Cricetulus griseus
cagcaccatgcccgcactcttggagcgccccaagctttccaacgctatggccagggctctgcacaggcacatgatgatggagcgggagcgcttacggcaggaggaggaagaggtggacaagatgatggaacaaaagatgaaagaagagcacgagagaagaaagaaaaaggagatggaagagaggatgtcactagaagagaccaaggaacaaattctgaaactacaggagaaactttcagctctacaggaggagaagcaccagcttttcttgcagctcaaaaaagttctgcatgaagaagagaaacggagacgaaaggaacagagtgacctaaccactctgacatcagctgcctaccagcagagcctgactgttcacacgggaactcacctcctcagcatgcagggggagt

SEQ ID NO: 5564 - DNA, 580 bp, Cricetulus griseus; identical to SEQ ID NO: 1922

SEQ ID NO: 5565 - DNA, 378 bp, Cricetulus griseus; identical to SEQ ID NO: 1923

SEQ ID NO: 5566 - DNA, 581 bp, Cricetulus griseus; identical to SEQ ID NO: 1924

SEQ ID NO: 5567 - DNA, 541 bp, Cricetulus griseus
  misc_feature (156)..(182): n is a, c, g, or t
  misc_feature (252)..(272): n is a, c, g, or t
  misc_feature (303)..(321): n is a, c, g, or t
  misc_feature (412)..(429): n is a, c, g, or t
ttccaatttgaagaatgttctagtttaaaagaatgcatctatttaatctttcccttgatgacttagggaggaagttgaaaagttgtggctttgaaataaaagcatcttatctgggtgtggtggtatgtatcttttttgtttgttttttttcgagtnnnnnnnnnnnnnnnnnnnnnnnnnnngtcccggaacttgctctgtagactaggctggcctagaactcacagagatatgcttacctctgcctccccnnnnnnnnnnnnnnnnnnnnnggccaccagtgcccagagggtggcatgtatnnnnnnnnnnnnnnnnnnncaggcagatatttttgagtttgaggacagctagaactatacagagagaccctgtctcaaaacaaaacaaaaaccacacacacaaaaaaacnnnnnnnnnnnnnnnnnnaaagtacggaaaaaacccaaacaatttatactgcagttcaatggtagagaagctgcttaccattcacatggccctagattccattcctgccctgcgagtataaataaggccc

SEQ ID NO: 5568 - DNA, 579 bp, Cricetulus griseus; identical to SEQ ID NO: 1926
  misc_feature (334)..(334): n is a, c, g, or t

SEQ ID NO: 5569 - DNA, 175 bp, Cricetulus griseus; identical to SEQ ID NO: 1927

SEQ ID NO: 5570 - DNA, 581 bp, Cricetulus griseus; identical to SEQ ID NO: 1928
  misc_feature (302)..(324): n is a, c, g, or t
  misc_feature (411)..(433): n is a, c, g, or t

SEQ ID NO: 5571 - DNA, 85 bp, Cricetulus griseus
gcgtgcgttttcaacacaggattttgtagccggatatctgtctgggcacctattacaaggcccatgccttttgggtgtggattca

SEQ ID NO: 5572 - DNA, 288 bp, Cricetulus griseus; identical to SEQ ID NO: 1930
  misc_feature (254)..(254): n is a, c, g, or t

SEQ ID NO: 5573 - DNA, 580 bp, Cricetulus griseus; identical to SEQ ID NO: 1931
  misc_feature (509)..(540): n is a, c, g, or t

SEQ ID NO: 5574 - DNA, 538 bp, Cricetulus griseus
tttatttccccatttaaatgtgcccgtggttttatcagcctggtaacttaagagtccagatgtctaggataaaatggctgtcattctataaactgttcaccattctttaaggcttatatttacctcaggaaacttattctagtatggggggaccaattgaaatctcaagtgataaatacttctttacacctacacactggtacctaattctgtcttagttcagtgagccataggtcaggcagctagatggttagtgagccataagtcgggcggctagatggctgaaagctcattggagtaaaacaaggagtgcctgccagcactgaatcagggacaagtggctattccaaccagagtggcatctgtcatcagtaagatgaagggattgcctttggcagtgacagtgtcctattccaagtctggaatggcatttttctcacactgcagcccatgaagctaagtccctcagcatttttagagaacttttgaaaatgaatttagttgcataatcaagctgagcaatttccactgtgggctt

SEQ ID NO: 5575 - DNA, 581 bp, Cricetulus griseus; identical to SEQ ID NO: 1933

SEQ ID NO: 5576 - DNA, 580 bp, Cricetulus griseus; identical to SEQ ID NO: 1934

SEQ ID NO: 5577 - DNA, 579 bp, Cricetulus griseus; identical to SEQ ID NO: 1935
  misc_feature (184)..(201): n is a, c, g, or t

SEQ ID NO: 5578 - DNA, 566 bp, Cricetulus griseus; identical to SEQ ID NO: 1936

SEQ ID NO: 5579 - DNA, 223 bp, Cricetulus griseus; identical to SEQ ID NO: 1937

SEQ ID NO: 5580 - DNA, 156 bp, Cricetulus griseus
cacccacgcgggggggactgatgagtttgctaaaggaagaaaagtggcagatctctatgaacttgtacagtatgctggaaacattattccaaggctttatctgttgatcacagttggagttgtatatgtcaagtcatttcctcaatccaggaaaga

SEQ ID NO: 5581 - DNA, 572 bp, Cricetulus griseus; identical to SEQ ID NO: 1939

SEQ ID NO: 5582 - DNA, 581 bp, Cricetulus griseus; identical to SEQ ID NO: 1940

SEQ ID NO: 5583 - DNA, 202 bp, Cricetulus griseus; identical to SEQ ID NO: 1941

SEQ ID NO: 5584 - DNA, 581 bp, Cricetulus griseus; identical to SEQ ID NO: 1942
  misc_feature (450)..(450): n is a, c, g, or t
  misc_feature (545)..(545): n is a, c, g, or t

SEQ ID NO: 5585 - DNA, 582 bp, Cricetulus griseus; identical to SEQ ID NO: 1943

SEQ ID NO: 5586 - DNA, 569 bp, Cricetulus griseus; identical to SEQ ID NO: 1944
  misc_feature (543)..(543): n is a, c, g, or t

SEQ ID NO: 5587 - DNA, 566 bp, Cricetulus griseus
tttttacctttggttgtactactataatgaactttagttgtaccttttaatgaaccgtggaagagttggtttcctttttaaggctgttgcacacttctagtgtacattctcaagcctccccatctcctcttgccccaaaagacagctgaccaccagtgccaaggtatgttgcagacttgacaactcacttgacagctgtggttgtcatcaagtcgtgagaggaaaacatagacagaggtaggctatgttccccattctcttgggagcaatgctagcttttcaatttctatttttaaaaatttagattatatttacttattttatgtggtatggtgggatggcacacaggtacaattaagagaataaattttggaagttggttctcaatttctaccgtgtctgacctgggctcagcctcaggccatgcagctttacccactgagccgtctccccagcccctttccattgttgttataagttgaatctgttttgtagctagcagcagtcctcctgcttcagcctctctaatagtgggaatgaactgccatgcccagcttgtttgggtt

SEQ ID NO: 5588 - DNA, 600 bp, Cricetulus griseus; identical to SEQ ID NO: 1946

SEQ ID NO: 5589 - DNA, 582 bp, Cricetulus griseus; identical to SEQ ID NO: 1947
  misc_feature (298)..(326): n is a, c, g, or t
  misc_feature (532)..(553): n is a, c, g, or t

SEQ ID NO: 5590 - DNA, 578 bp, Cricetulus griseus; identical to SEQ ID NO: 1948
  misc_feature (518)..(518): n is a, c, g, or t

SEQ ID NO: 5591 - DNA, 245 bp, Cricetulus griseus; identical to SEQ ID NO: 1949
  misc_feature (70)..(94): n is a, c, g, or t

SEQ ID NO: 5592 - DNA, 473 bp, Cricetulus griseus
  misc_feature (283)..(309): n is a, c, g, or t
acatgaagatccgattacaaagaccagtcgtgttttacgaatagaagccaaaagcaaggatggaaaattagtgccaatgacaatttttcacaaaatggattctgaggacttggagaagaagcccctcttggtgcatgtgtatggagcttatgggatggatttgaaaatgaatttccggcctgagaggcgagtcttggtagatgatggatggatcttaacatattgccatgttaagggtggtggcgagttgggcctccagtggcatgctgatggctgcctaacnnnnnnnnnnnnnnnnnnnnnnnnnnnaaaggcttgcattaagacgcttgatagccaaggcttgtgccagccgagcctaaccacactgagcgctttcaatgctggaggggtgcttgtgggagccctgtgcaacttcaaaccatagctccttcgaactgagactctggaggcacctttgttgcatgtcctca

SEQ ID NO: 5593 - DNA, 579 bp, Cricetulus griseus; identical to SEQ ID NO: 1951

SEQ ID NO: 5594 - DNA, 579 bp, Cricetulus griseus; identical to SEQ ID NO: 1952

SEQ ID NO: 5595 - DNA, 581 bp, Cricetulus griseus; identical to SEQ ID NO: 1953
  misc_feature (457)..(482): n is a, c, g, or t

SEQ ID NO: 5596 - DNA, 567 bp, Cricetulus griseus; identical to SEQ ID NO: 1954

SEQ ID NO: 5597 - DNA, 579 bp, Cricetulus griseus; identical to SEQ ID NO: 1955
  misc_feature (465)..(483): n is a, c, g, or t

SEQ ID NO: 5598 - DNA, 567 bp, Cricetulus griseus; identical to SEQ ID NO: 1956
  misc_feature (338)..(357): n is a, c, g, or t
  misc_feature (516)..(516): n is a, c, g, or t

SEQ ID NO: 5599 - DNA, 476 bp, Cricetulus griseus; identical to SEQ ID NO: 1957

SEQ ID NO: 5600 - DNA, 580 bp, Cricetulus griseus; identical to SEQ ID NO: 1958

SEQ ID NO: 5601 - DNA, 580 bp, Cricetulus griseus; identical to SEQ ID NO: 1959

SEQ ID NO: 5602 - DNA, 128 bp, Cricetulus griseus; identical to SEQ ID NO: 1960

SEQ ID NO: 5603 - DNA, 432 bp, Cricetulus griseus; identical to SEQ ID NO: 1961
  misc_feature (373)..(400): n is a, c, g, or t

SEQ ID NO: 5604 - DNA, 579 bp, Cricetulus griseus; identical to SEQ ID NO: 1962

SEQ ID NO: 5605 - DNA, 134 bp, Cricetulus griseus; identical to SEQ ID NO: 1963

SEQ ID NO: 5606 - DNA, 579 bp, Cricetulus griseus; identical to SEQ ID NO: 1964

SEQ ID NO: 5607 - DNA, 153 bp, Cricetulus griseus
gtggactctgcctgggctggtctttaccaagttacagtgaatctagtagacattttacctgtctccaaatctatcttgggtacagcccctggatattttatctgggtttggagagttttaaagggtgtgcgcgcacgtgtgtgtgtggggggg

SEQ ID NO: 5608 - DNA, 541 bp, Cricetulus griseus
caacccagtgcttctcaaagtgaagaaaaagctcctgagctgcccaaaccaaagaagaacagatgttttatgtgtagaaagaaagttggccttacagggtttgactgccgatgtggaaatttgttttgtggacttcaccgttactctgacaagcacaactgtccatatgattacaaagcagaagctgcagcaaaaatcagaaaagagaatccagttgttgtggctgaaaagatccagagaatataaaattactacatgtgaagagactgaaactttgtttttattttaatatatcgtaggaaaacattaaagagcagatgcatggccattttcctttgatgttctccagagttttgctttatatttgtctgtcgtataattgatattttaggatgtttgggtgtttgttacaggcagaattggatagatacagccctacaaatgtatatgccctccccctcataaaattggacaaaaatctgcgcaacaaattgaaataacacagataataggaacaaaatttagttccacgtgccaaatt

SEQ ID NO: 5609 - DNA, 580 bp, Cricetulus griseus; identical to SEQ ID NO: 1967

SEQ ID NO: 5610 - DNA, 385 bp, Cricetulus griseus; identical to SEQ ID NO: 1968

SEQ ID NO: 5611 - DNA, 580 bp, Cricetulus griseus; identical to SEQ ID NO: 1969

SEQ ID NO: 5612 - DNA, 557 bp, Cricetulus griseus; identical to SEQ ID NO: 1970
  misc_feature (494)..(494): n is a, c, g, or t
  misc_feature (516)..(516): n is a, c, g, or t

SEQ ID NO: 5613 - DNA, 578 bp, Cricetulus griseus; identical to SEQ ID NO: 1971

SEQ ID NO: 5614 - DNA, 146 bp, Cricetulus griseus; identical to SEQ ID NO: 1972

SEQ ID NO: 5615 - DNA, 417 bp, Cricetulus griseus; identical to SEQ ID NO: 1973

SEQ ID NO: 5616 - DNA, 234 bp, Cricetulus griseus; identical to SEQ ID NO: 1974

SEQ ID NO: 5617 - DNA, 493 bp, Cricetulus griseus
  misc_feature (128)..(144): n is a, c, g, or t
tagtgccacagccaagactcaacataatggcatgaacaacatcattcgactgttcctgaagaagggactagtcaatgacctggccagagttcctcacagcctagacttgtcgagtcctaatatggccnnnnnnnnnnnnnnnnntctaaaacctttggaaacactttcccggattgtaaaccagcccagtagcctttttggcagcaagagtgcttctagcaagagcaagtctgagcaggatgcccaaggagcctctcaagattcaaatagccatcagcaagatccaggcgagcctggggaagcagaagtacaggaggaggatcatgatgtctctcagacagaggttgcagatggggatatcatggatggggaggctgaaaccgactcagtggtgattgctgggcaacctgaggtgctcagttcacaagagatgcaggtagggaggcagatcattccagcaatcttcagttgcaacgctgaaccaaaaccccca

SEQ ID NO: 5618 - DNA, 357 bp, Cricetulus griseus; identical to SEQ ID NO: 1976
  misc_feature (200)..(248): n is a, c, g, or t

SEQ ID NO: 5619 - DNA, 417 bp, Cricetulus griseus; identical to SEQ ID NO: 1977
  misc_feature (333)..(352): n is a, c, g, or t

SEQ ID NO: 5620 - DNA, 255 bp, Cricetulus griseus; identical to SEQ ID NO: 1978

SEQ ID NO: 5621 - DNA, 361 bp, Cricetulus griseus; identical to SEQ ID NO: 1979
  misc_feature (245)..(294): n is a, c, g, or t

SEQ ID NO: 5622 - DNA, 581 bp, Cricetulus griseus; identical to SEQ ID NO: 1980
  misc_feature (70)..(107): n is a, c, g, or t

SEQ ID NO: 5623 - DNA, 380 bp, Cricetulus griseus; identical to SEQ ID NO: 1981

SEQ ID NO: 5624 - DNA, 203 bp, Cricetulus griseus; identical to SEQ ID NO: 1982

SEQ ID NO: 5625 - DNA, 246 bp, Cricetulus griseus; identical to SEQ ID NO: 1983
  misc_feature (60)..(136): n is a, c, g, or t
  misc_feature (140)..(166): n is a, c, g, or t
  misc_feature (182)..(221): n is a, c, g, or t

SEQ ID NO: 5626 - DNA, 576 bp, Cricetulus griseus; identical to SEQ ID NO: 1984

SEQ ID NO: 5627 - DNA, 577 bp, Cricetulus griseus; identical to SEQ ID NO: 1985

SEQ ID NO: 5628 - DNA, 518 bp, Cricetulus griseus
aaatgagtttaaggaatggcagtacttcaagagcctgcacaggttcactcacatcccttcaggaaagtgcttagatcgatcagatgtccttcatcaagtcttcatctccaactgtgactccaataaaatgactcagaagtgggaaatgaataacattcacagtgtttaagaagagtgcacaaaaccaataatctacctactgacaagtacacttacagaggactgaaaatcgcctggaacctgctgcaaccgttattactaattctgtacagctccaatcctggaacctctgatcagattgaaggacattgataaactgtgatttttacaataacattatcatctgcagttactgtttacaaaactgcttttaccttaaactctgtagatgtttacatcctttttcttttgtttttagatgacgttggtaatttgtgcctttaactccgttcagaacagagttaaagcatatgttgtcttctttgggaatacactcaggggtctgaaaggcagtttgg

SEQ ID NO: 5629 - DNA, 561 bp, Cricetulus griseus; identical to SEQ ID NO: 1987
  misc_feature (62)..(76): n is a, c, g, or t
  misc_feature (254)..(254): n is a, c, g, or t

SEQ ID NO: 5630 - DNA, 195 bp, Cricetulus griseus; identical to SEQ ID NO: 1988
  misc_feature (67)..(117): n is a, c, g, or t

SEQ ID NO: 5631 - DNA, 578 bp, Cricetulus griseus; identical to SEQ ID NO: 1989
  misc_feature (370)..(429): n is a, c, g, or t

SEQ ID NO: 5632 - DNA, 579 bp, Cricetulus griseus; identical to SEQ ID NO: 1990

SEQ ID NO: 5633 - DNA, 202 bp, Cricetulus griseus; identical to SEQ ID NO: 1991

SEQ ID NO: 5634 - DNA, 338 bp, Cricetulus griseus; identical to SEQ ID NO: 1992

SEQ ID NO: 5635 - DNA, 115 bp, Cricetulus griseus; identical to SEQ ID NO: 1993

SEQ ID NO: 5636 - DNA, 579 bp, Cricetulus griseus; identical to SEQ ID NO: 1994

SEQ ID NO: 5637 - DNA, 305 bp, Cricetulus griseus; identical to SEQ ID NO: 1995
  misc_feature (219)..(254): n is a, c, g, or t

SEQ ID NO: 5638 - DNA, 506 bp, Cricetulus griseus; identical to SEQ ID NO: 1996
  misc_feature (407)..(407): n is a, c, g, or t

SEQ ID NO: 5639 - DNA, 567 bp, Cricetulus griseus; identical to SEQ ID NO: 1997
  misc_feature (416)..(416): n is a, c, g, or t

SEQ ID NO: 5640 - DNA, 448 bp, Cricetulus griseus; identical to SEQ ID NO: 1998

SEQ ID NO: 5641 - DNA, 576 bp, Cricetulus griseus; identical to SEQ ID NO: 1999
  misc_feature (123)..(123): n is a, c, g, or t
  misc_feature (134)..(134): n is a, c, g, or t
  misc_feature (465)..(465): n is a, c, g, or t

SEQ ID NO: 5642 - DNA, 422 bp, Cricetulus griseus; identical to SEQ ID NO: 2000
  misc_feature (221)..(242): n is a, c, g, or t

SEQ ID NO: 5643 - DNA, 594 bp, Cricetulus griseus; identical to SEQ ID NO: 2001
  misc_feature (470)..(502): n is a, c, g, or t

SEQ ID NO: 5644 - DNA, 415 bp, Cricetulus griseus; identical to SEQ ID NO: 2002

SEQ ID NO: 5645 - DNA, 501 bp, Cricetulus griseus; identical to SEQ ID NO: 2003
  misc_feature (295)..(317): n is a, c, g, or t
  misc_feature (320)..(332): n is a, c, g, or t
  misc_feature (376)..(406): n is a, c, g, or t

SEQ ID NO: 5646 - DNA, 582 bp, Cricetulus griseus; identical to SEQ ID NO: 2004
  misc_feature (119)..(136): n is a, c, g, or t

SEQ ID NO: 5647 - DNA, 354 bp, Cricetulus griseus; identical to SEQ ID NO: 2005

SEQ ID NO: 5648 - DNA, 582 bp, Cricetulus griseus; identical to SEQ ID NO: 2006
  misc_feature (89)..(89): n is a, c, g, or t
  misc_feature (310)..(327): n is a, c, g, or t
  misc_feature (477)..(477): n is a, c, g, or t

SEQ ID NO: 5649 - DNA, 581 bp, Cricetulus griseus
aaggaatggttcatggacactgcatgtgcaggcataacaccaaaggcataaactgtgagctgtgcatggatatctaccatgatttcccatggagacctgctgaaggtcggaacagcaatgcttgcaaaaaatgcaactgcaatgaacattccagctcatgtcactttgacatggcagttttcttggccactgggaatgtcagcgggggcgtgtgtgatgactgtcagcacaacaccatgggacgcaactgcgagcagtgcaaaccattctactaccagcaccccgagagggacgtccgagaccccaatctctgtgaaccatgtacctgtgacccagctggttctgagaatggaggaatctgtgacggttacactgatttctctgcgggtctcattgctggtcagtgccggtgcaaattgcatgttgaaggacagcgctgcgatgtctgtaaagaaggcttctatggtttaagtgctgaagacccatttggttgtaaatcatgtgcttgcaatcctctgggaacaattcctggtgggaatccttgtgattctgagactgggtactgccactgtaagcaactt

SEQ ID NO: 5650 - DNA, 341 bp, Cricetulus griseus; identical to SEQ ID NO: 2008

SEQ ID NO: 5651 - DNA, 506 bp, Cricetulus griseus; identical to SEQ ID NO: 2009

SEQ ID NO: 5652 - DNA, 293 bp, Cricetulus griseus
  misc_feature (110)..(110): n is a, c, g, or t
  misc_feature (220)..(220): n is a, c, g, or t
aaatggccaatttaagccgctgcaacctcgcacatgcaaatctctgctgtgctaatcttgaacgagctgatctttctggatcagtgctcgactgcgcaaatctccagggnagtcaagatgctctgctcaaacgcagaaggcgcatccctgaggctctgtaattttgaggatccttccggtcttaaagccaacttacagggtgctaatctgaaaggcgtanatatggaaggaagtcagatgacaggaattaaccttcgagttgccaccttaaaaaatgcaaaactgaagaactg

SEQ ID NO: 5653 - DNA, 126 bp, Cricetulus griseus
  misc_feature (55)..(55): n is a, c, g, or t
  misc_feature (71)..(71): n is a, c, g, or t
  misc_feature (92)..(92): n is a, c, g, or t
  misc_feature (99)..(99): n is a, c, g, or t
tcttcaaggtaagtagatgggcatcggtggcgtcctcggcctcctctggttccanagacggttacctaagnattcctgccaggcacattganatgtgtntgatggtgacagctgatcacgggccat

SEQ ID NO: 5654 - DNA, 350 bp, Cricetulus griseus
  misc_feature (71)..(71): n is a, c, g, or t
  misc_feature (80)..(80): n is a, c, g, or t
  misc_feature (83)..(83): n is a, c, g, or t
  misc_feature (107)..(107): n is a, c, g, or t
  misc_feature (121)..(121): n is a, c, g, or t
  misc_feature (143)..(143): n is a, c, g, or t
  misc_feature (164)..(164): n is a, c, g, or t
  misc_feature (203)..(203): n is a, c, g, or t
  misc_feature (218)..(218): n is a, c, g, or t
  misc_feature (233)..(233): n is a, c, g, or t
  misc_feature (245)..(245): n is a, c, g, or t
  misc_feature (247)..(247): n is a, c, g, or t
  misc_feature (296)..(296): n is a, c, g, or t
  misc_feature (307)..(307): n is a, c, g, or t
ttccctaggacctgagctgggtcctcaacacccacattaggcagctgtaaccccacctgtacctccagctntcagggatntancacccttttttaccctccaccaantactcacacccacncatacaaataagtaatattatntttttaaaaaaaataatctantttaaccctttgactttatagctcaggaaaaactgaaanaacggggactatacnctgatacagtcaaanatggggcccggntntttgccagccaggcaaagcgtttgccatgcaaacctaagtacctgatgngatccccagtncccacaaaaaagctgagcacatagccggacagacacctgcacg

SEQ ID NO: 5655 - DNA, 163 bp, Cricetulus griseus
  misc_feature (88)..(88): n is a, c, g, or t
  misc_feature (98)..(98): n is a, c, g, or t
  misc_feature (138)..(138): n is a, c, g, or t
aaaaagccagctctgagggtggtgcatccacgggtgctggcctggactcgctgcacaagaacagcgtcagtcaaatctcggtgctcancgggggcaangccaagtgctcgcagttctgcactacaggcatggtatggnggcatgagcatctgggatgtgaaga

SEQ ID NO: 5656 - DNA, 394 bp, Cricetulus griseus; identical to SEQ ID NO: 2014
  misc_feature (193)..(193): n is a, c, g, or t
  misc_feature (361)..(361): n is a, c, g, or t

SEQ ID NO: 5657 - DNA, 549 bp, Cricetulus griseus
  misc_feature (455)..(455): n is a, c, g, or t
  misc_feature (465)..(465): n is a, c, g, or t
tgtgtttttaaaaggcaagtatgaatctttttaaaggctaaccaccgtgggcatagtttcctctaacattaaactgcagactccccccaaacccttatctagtagatacctgaaatgtgcttccccatgtttgaaacttcagattgcttacaaattaaagtttaatgtataactatggtactctaggttaactaaaataaaacagaacagtcaatactataataaaagttatatgaatctcaacatctaattatgctgtatttacccttctcatgagatgacccaacgtctataggagatgaagtgagcaaggtgttatgtcatatcactggtgattacgcaagggtcacctgcacacagcatggcagtacctggatgtccctatgataattaagatggctagtgagtggctgtcgagagggcagcatgtgcagtgtggatagctcatgtctcangaaagacaangtttcatgacattgctgagattgtctgcattttacagttagtcttttcacttgactttttataactgaagtcactgaaaaggga

SEQ ID NO: 5658 - DNA, 229 bp, Cricetulus griseus
  misc_feature (26)..(26): n is a, c, g, or t
  misc_feature (107)..(107): n is a, c, g, or t
  misc_feature (182)..(182): n is a, c, g, or t
  misc_feature (189)..(189): n is a, c, g, or t
tgggttaccggggcccccccttcggnggttcggacccacggcgttccgggtagggaactggccctttaacatttttaatttcggggcaggaacttgggccaacacanggggcttttcttgggaggatgatacaaatcttttaacgtgaattgttacagctcatggcattcgttataattttncttcatnagtaatacctctcaataaattggcgggtttggggaattga

SEQ ID NO: 5659 - DNA, 579 bp, Cricetulus griseus; identical to SEQ ID NO: 2017

SEQ ID NO: 5660 - DNA, 246 bp, Cricetulus griseus; identical to SEQ ID NO: 2018

SEQ ID NO: 5661 - DNA, 117 bp, Cricetulus griseus
  misc_feature (70)..(70): n is a, c, g, or t
  misc_feature (89)..(89): n is a, c, g, or t
  misc_feature (92)..(92): n is a, c, g, or t
ctgctgctgatagtgtaagcttttccatgccacggttgctgggtgtttgtccttcctgaggtgaggccancagtgttcctgggagtgtncantctggacacaagtgctgagtcacca

SEQ ID NO: 5662 - DNA, 279 bp, Cricetulus griseus; identical to SEQ ID NO: 2020
  misc_feature (158)..(158): n is a, c, g, or t
  misc_feature (186)..(186): n is a, c, g, or t
  misc_feature (206)..(206): n is a, c, g, or t
  misc_feature (239)..(239): n is a, c, g, or t
  misc_feature (249)..(249): n is a, c, g, or t
  misc_feature (252)..(252): n is a, c, g, or t

SEQ ID NO: 5663 - DNA, 477 bp, Cricetulus griseus
  misc_feature (407)..(407): n is a, c, g, or t
  misc_feature (424)..(424): n is a, c, g, or t
taatcgcttggtaccttcaaaaggaaatggagtaagaaaattctgtgatatccagatccgaaggttacggaggttaggcattgaaaagactgaccccaccacactgacggatgacgagataatcagatttgtaagactggaaattgatccagaaaccataacgtggcagagagtgctggacaccaatgatagattcctgaggaagatcactattggacagtctccaacagagaaaggccacacacgcacggctcagtttgatatctctgtggccagtgaaattatggctgttctggccctcactacttctctgaaagatatgatagagagagtgggcaaaatggtggtggcatccagtaagaaaggcgaacccatcactgttgatgatctgggcgtgagtggagcantggcggcgctgttgaangatgcaatcaaacccaatcttatgcagaccttatagggcacaccggtgtttgt

SEQ ID NO: 5664 - DNA, 579 bp, Cricetulus griseus; identical to SEQ ID NO: 2022
  misc_feature (38)..(38): n is a, c, g, or t
  misc_feature (377)..(377): n is a, c, g, or t
  misc_feature (470)..(470): n is a, c, g, or t
  misc_feature (509)..(509): n is a, c, g, or t
  misc_feature (530)..(530): n is a, c, g, or t
  misc_feature (545)..(545): n is a, c, g, or t
  misc_feature (550)..(550): n is a, c, g, or t

SEQ ID NO: 5665 - DNA, 386 bp, Cricetulus griseus
  misc_feature (70)..(70): n is a, c, g, or t
  misc_feature (181)..(181): n is a, c, g, or t
  misc_feature (196)..(196): n is a, c, g, or t
  misc_feature (226)..(226): n is a, c, g, or t
  misc_feature (229)..(229): n is a, c, g, or t
  misc_feature (305)..(305): n is a, c, g, or t
  misc_feature (358)..(358): n is a, c, g, or t
atatcatggacccacacaaaagcagggctcattaagggcttacaggaggactggaagtgacaatcgcagnagcttgcatggggaatgtgctaggtcctctgtatatatgctgtggtcctttagcctgggtaacagtggggtctctgacccttttgttcctagtgggttgctttgctatgangctttttgctatgangttttattgcatgttgttagatatctccangangcctactcttttctgaagagaagtgtatatgggggagaggaaaagtgtgtggggaattaaactgggaggagtgganggagggaaactgcagtcccaatgtaacatatgagaaaagaataactaaaaagnaaaaaaaaaaccttaaagtatgacatag

SEQ ID NO: 5666 - DNA, 269 bp, Cricetulus griseus
  misc_feature (71)..(71): n is a, c, g, or t
  misc_feature (197)..(197): n is a, c, g, or t
  misc_feature (217)..(217): n is a, c, g, or t
  misc_feature (232)..(232): n is a, c, g, or t
  misc_feature (236)..(236): n is a, c, g, or t
  misc_feature (243)..(243): n is a, c, g, or t
aaagcaagaaaatgagcatcttactcaggaacattctagaatgtggcaataaggatgggggagggaaacantttcccgggctggttcgcaggggaaccctggctcaaggtctggttctgggaatccatggggtagaagtgacttcttgcaaatgggtcacgctactacgcatatggtgcatgtgggtggaacataantgtgacttttgcctcttttnagaggtcaggtttgntganaggtttnaaatgacctggaaagtccatccaatg

SEQ ID NO: 5667 - DNA, 506 bp, Cricetulus griseus
  misc_feature (266)..(266): n is a, c, g, or t
  misc_feature (293)..(293): n is a, c, g, or t
  misc_feature (343)..(343): n is a, c, g, or t
  misc_feature (431)..(432): n is a, c, g, or t
catgtggccctctcaaggtaatttattttacgcatttactgtttaccgaacaaatgtctgactgtgcccgggtgacactgccctccaggggagaggacctttctcagctcatcactgcgatttgcacattgccccacgggacactcaggcctgcattctgtcccctggacgtggaaacattctgaaccggtctctctccctctgctgtgttcagacagaagcttgattgagtcttgagtgacaagcttggaatggttgtggctcanacatcgacctgcccaggaacaccaggncgtgtctagccgacaccttgatgccacaagcatgctccccctctgccgangtctatcggtctatcgggatggtgtgtggccagggggcggagctgaatccctcacacacctttcccactttcttcttgttaaaatccnngacaactcgaaactgaatctccccgaactctacttatctgatgaagtggtgggaccctctcaagttttcttttc

SEQ ID NO: 5668 - DNA, 405 bp, Cricetulus griseus
  misc_feature (190)..(190): n is a, c, g, or t
  misc_feature (225)..(251): n is a, c, g, or t
  misc_feature (337)..(337): n is a, c, g, or t
  misc_feature (375)..(375): n is a, c, g, or t
taaactgcatgtgccgcgccctataagacctttgacctccgcacccaagcgtcgtctggtgtccccgtgggacccagcccctcccagcgtcccgaatgctcttgaggaggaccagagtgagggcagcaagagctactcagcaacaatgtcttcagaagtggagacctcggaaggggtagatgagtcaganaaaaagaactctgtggccccagagaaggaaaatcnnnnnnnnnnnnnnnnnnnnnnnnnnntcctaaaggaagggaccaaggaagcacacgaccgggcagaaaatacccagtttgtcaaagacttcttgaaaggaaacattaagaangagctattttaagcttgccactaccgcactttattttnacatacctcagcccttggaggaggaaatgg

SEQ ID NO: 5669 - DNA, 481 bp, Cricetulus griseus
  misc_feature (429)..(429): n is a, c, g, or t
  misc_feature (438)..(438): n is a, c, g, or t
aaatgggagtacactaaataagcagtaaattttgattcctttttcatgtatcttttgatagctatcatgaagaacagtgtaacagacagtaaaacaaaaccatggctgataaataataaaaatggaggttcaagggcaccatagatcttctatattttattaggtgatgcttgaaatatatttataaccatatctagttttaaatagctgcccaaaaagtaacctagggaatgatttaacctacatggtacttttaataaaacttccccagatgtcctatggtgattttgatgttccctgagaaaagaacagcctcaagtctcgggggcatctgtagaagaggtacagctggaactatctctaatttaacaaaataataataacagtaaaacatgttttctaatgaaaaacatgagatgatatattcanaaactctantagtggctatttatgaatcaacccctatagacctcattgggct

SEQ ID NO: 5670 - DNA, 536 bp, Cricetulus griseus
  misc_feature (306)..(306): n is a, c, g, or t
  misc_feature (433)..(433): n is a, c, g, or t
  misc_feature (453)..(453): n is a, c, g, or t
  misc_feature (496)..(496): n is a, c, g, or t
  misc_feature (505)..(505): n is a, c, g, or t
ctatattaatcactttctttgtaatcccttcacagtcccaggtttagtgaaaaactgctgtaaacacgggggacacagtttaacaatgcaacttttaatgactgttttctttttccttaacctactaatagtttgtggatctgataagcaagggtgggtggctgagaaaaactctgtgttgggcttaatcagtcactacatccaaaccctaacaggtcaccctggtgaccagggcattcgtataagaaaagcattgtatgtgactctgtgcagcacccccagatgccaccctactctgatcatagngaatcttctgcttaggacaccaaagataagaattagatactactctcctttgtgtataatcttgtagacacttacttgatttttttgtttttttactttttaattctaaacgatacaaaatgctggngtatctatcttttcattcanccagcaaaccagaattagattatgctcattttttttcaaaaanggaagtaancaaaataataaatattgactcctgtgtttat

SEQ ID NO: 5671 - DNA, 565 bp, Cricetulus griseus
  misc_feature (105)..(105): n is a, c, g, or t
  misc_feature (234)..(251): n is a, c, g, or t
  misc_feature (284)..(299): n is a, c, g, or t
  misc_feature (400)..(400): n is a, c, g, or t
  misc_feature (509)..(534): n is a, c, g, or t
agcgtgcagccgtcatggtcagccacctgcagctcaacaacggcgccaagtatgcccatcctgggcctgggcacctggaagtcccctcccggccaggtgactgangccgtgaaggctgccattgacattgggtaccgccacattgactgtgcccaggtgtaccagaatgagaaggaggtgggaatggccctccaggagaagctcaaggagcaggtggtgaaacgccaagacctnnnnnnnnnnnnnnnnnngtggtgcacgtttcacgacaagagcatggtgannnnnnnnnnnnnnnngacgctcagtgacctgcagctggactacctggacctctaccttattcactggccaacaggtttcaagcccgggcctgattacttcccactggacgaatcangaaatgtgattcccagtgagactgattttgtggacacttggacggccatggaacagctggtggatgaaggtttggtgaaatccattggtgtctccaacttcaaccctcnnnnnnnnnnnnnnnnnnnnnnnnnncccggcttaaaatataagcctgccggttaat

SEQ ID NO: 5672 - DNA, 377 bp, Cricetulus griseus
  misc_feature (225)..(260): n is a, c, g, or t
  misc_feature (313)..(313): n is a, c, g, or t
  misc_feature (351)..(351): n is a, c, g, or t
atggacagaaatttagaggtgcaggtccaaacaagaaagtggccaaggcaagtgcagcactagctgccttagagaagttgttttctggacccaatgcagcaaataataagaaaaaaaagatcattcctcaggcaaagggtgttgtgaatacagcagtatctgcagcagttcaggcagttcggggcagaggaagaggaactctgacaaggggagcgttcgtggggnnnnnnnnnnnnnnnnnnnnnnnnnnnnnnnnnnnnggaacaccatatggttacagcactgctgcccctgcatatggtttgcccaaganaatggttctgttacccgttatgaaattcccaacatatnctgttcccccactactcattctttta

SEQ ID NO: 5673 - DNA, 483 bp, Cricetulus griseus
  misc_feature (122)..(122): n is a, c, g, or t
  misc_feature (249)..(249): n is a, c, g, or t
  misc_feature (367)..(367): n is a, c, g, or t
  misc_feature (403)..(418): n is a, c, g, or t
gaggcgcgatggcaggtgtaggggtcgagcggctgcaggcgatggtgcgatttacgctgctggtgctcactgtgtgtgctgcgggtgcccatgggctctatttccacatcggcgagactganaagcgttgcttcatcgaggaaatacccgacgagaccatggtcatcggcaactatcgaacccagatgtgggacaagcagaaggaggtcttcctgccctcgacccctggcctgggcatgcacgtagaantgaaggacccggacggcaaggtggtactgtcccgacaatatggttccgagggccgcttcaccttcacgtcccacacacccggtgaccatcagatttgtctgcactccaactccaccangatggctctcttcgctggaggaaaactgcgtgtacnnnnnnnnnnnnnnnntggggagcatgccaacaactaccctgagattgctgctaaagataagttaacagagctgcagcttt

SEQ ID NO: 5674 - DNA, 324 bp, Cricetulus griseus
  misc_feature (114)..(114): n is a, c, g, or t
  misc_feature (189)..(189): n is a, c, g, or t
  misc_feature (246)..(246): n is a, c, g, or t
  misc_feature (289)..(289): n is a, c, g, or t
ggtaagtgtgtgctgtctgagcatgtgcagatggaggagaagtgtgggggcttggtggggatccagaccaagatcgtgcaggtgtcagcaatggaggatgggaccgtcatcaangataccaatgtggtgctggagatccccgctgccaccaccattgcctgtggcatcatcgagctgtatgtgaaacangatggccagtttgaattctgtctcctccaagggaaacatggtggctttgagcatganaagaaagttgactctgtctacttggaccccctggcctacaganaatttgcattcctggacatgccagatgggggtcaa

SEQ ID NO: 5675 - DNA, 285 bp, Cricetulus griseus
  misc_feature (37)..(37): n is a, c, g, or t
  misc_feature (119)..(146): n is a, c, g, or t
  misc_feature (181)..(181): n is a, c, g, or t
  misc_feature (213)..(213): n is a, c, g, or t
atattggttgtgtacattttaatcccagtactcgggnagtcagagtacaagtgaatccatgtgagctcgaggccagagagttctaggccagctagggctgcatagtgaaaccctatttnnnnnnnnnnnnnnnnnnnnnnnnnnnnataccttattaaatttagactaagcagaaaggaantgggaggagttgtttgagaaagaacaagaaantggcctcagggacataacactgttagacctgcctttcttcccacagctcatgtgcatgtaaccttgctccat

SEQ ID NO: 5676 - DNA, 237 bp, Cricetulus griseus
  misc_feature (120)..(120): n is a, c, g, or t
  misc_feature (129)..(129): n is a, c, g, or t
  misc_feature (164)..(164): n is a, c, g, or t
  misc_feature (181)..(181): n is a, c, g, or t
ctctggggaagctggaccgccccctctacagagttggcacagaaggcccagctcattaattcccaaggatggggaggccaggtctccactggagtaactctccgagggaccgcagcccanacacagggnatgaaactgttaggtcatgggggtcccagcttaanggggtcagccaccccangctggtaagggcagtgtggcccactctcaaggtgagggaccttctgcggagcccta

SEQ ID NO: 5677 - DNA, 409 bp, Cricetulus griseus; identical to SEQ ID NO: 2035
  misc_feature (173)..(198): n is a, c, g, or t

SEQ ID NO: 5678 - DNA, 577 bp, Cricetulus griseus
ggcacttccgcgggggagcagccggagagggagccatggggacagtgcacgcccggagtctggagcctcttccatcgagtggacctgactttggagctttgggagaagaagctgagtttgtggaagttgaacctgaggcgaaacaggaaattctggaaaacaaagatgtggtggttcagcatgttcattttgatggacttggacggactaaggatgacatcatcatttgtgaaattgaagatgtttttaaggctaaaaacctcattgaggtaatgcggaaatcacatgaaacccgtgaaaaactgcttcgcctaggaatttttaggcaagtggatgttttgatcgacacatgtcatggtgatgatgcactgccaaatggattagatgtcacctttgaagtgacagagttaaggaggcttactggcagttacaacaccatggttggaaacaatgaaagcagtatggtacttggcctcaaactccccaatctcctatgacgtgcagaaaaagtgacttttcagttttcatatggaaccaaagaaacttcctatggcctgtcattcttcataccacagct

SEQ ID NO: 5679 - DNA, 414 bp, Cricetulus griseus; identical to SEQ ID NO: 2037

SEQ ID NO: 5680 - DNA, 519 bp, Cricetulus griseus; identical to SEQ ID NO: 2038
  misc_feature (199)..(303): n is a, c, g, or t

SEQ ID NO: 5681 - DNA, 579 bp, Cricetulus griseus; identical to SEQ ID NO: 2039

SEQ ID NO: 5682 - DNA, 467 bp, Cricetulus griseus; identical to SEQ ID NO: 2040

SEQ ID NO: 5683 - DNA, 331 bp, Cricetulus griseus; identical to SEQ ID NO: 2041

SEQ ID NO: 5684 - DNA, 193 bp, Cricetulus griseus; identical to SEQ ID NO: 2042

SEQ ID NO: 5685 - DNA, 582 bp, Cricetulus griseus; identical to SEQ ID NO: 2043

SEQ ID NO: 5686 - DNA, 578 bp, Cricetulus griseus; identical to SEQ ID NO: 2044

SEQ ID NO: 5687 - DNA, 489 bp, Cricetulus griseus
ccgccggggtcggtgaaggatcccaagatggccgggcgtaaacttgccctaaaaaccattgattgggtgtcttttgtggagatcatacctcgaaaccaaaagacaattgcaaactccctgaagtcttggaatgagaccctccacaccaggttggctaatctgcctgagaaaccaccagcgattgactgggcttattacaagaccagagtggccaaggctggcttggtggatgattttgaaaagaagtacaatgccctgaagattccagtgcctgaggataaatacacagccctggtggacaatgaggaaagggaggatgtgaagaactgtgctgcgttcctgtctgaatcccaggacaggatccaggaatatgagaagcagctggagaagattaagaacatcatcccctttgatcagatgaccattgatgacttgaatgaagtcttcccagaaaccaagctggacaagaagaagtacccctactggcct

SEQ ID NO: 5688 - DNA, 539 bp, Cricetulus griseus
  misc_feature (160)..(172): n is a, c, g, or t
  misc_feature (174)..(191): n is a, c, g, or t
gctaaggtactgactgctaactaatttcaaagatttttacaaaaaacgtagagccaacctggtagtggtgtatgcctgtgatctcggcactggggaggcagaggtaggcaaatctgcatatagtgagaacatattttagagaagcaatctcaaattgtcnnnnnnnnnnnnngnnnnnnnnnnnnnnnnnngctttatgttttgagccaaggtctcactatataggcctggcctggaactcattatgtagactaggatgaccttaaactcatggggatccatctgcctcagcctcccaaatactggaaccaaaggcatgtaccaccaggtctggctgcaaattgacttttaaaattaactacctaatttgttttgggccacttacatattagtttctgtacatctctaaaagagtgacttttaaaatctataaaatgttaagtttaagttttgggttgttggggcagtagttacattgtgactctcacatccgccttagttaagtgcatcaccagtcaatagaatgtctgcagggctta

SEQ ID NO: 5689 - DNA, 371 bp, Cricetulus griseus; identical to SEQ ID NO: 2047

SEQ ID NO: 5690 - DNA, 580 bp, Cricetulus griseus; identical to SEQ ID NO: 2048

SEQ ID NO: 5691 - DNA, 327 bp, Cricetulus griseus; identical to SEQ ID NO: 2049

SEQ ID NO: 5692 - DNA, 579 bp, Cricetulus griseus; identical to SEQ ID NO: 2050
  misc_feature (440)..(457): n is a, c, g, or t

SEQ ID NO: 5693 - DNA, 509 bp, Cricetulus griseus; identical to SEQ ID NO: 2051

SEQ ID NO: 5694 - DNA, 404 bp, Cricetulus griseus; identical to SEQ ID NO: 2052

SEQ ID NO: 5695 - DNA, 200 bp, Cricetulus griseus; identical to SEQ ID NO: 2053

SEQ ID NO: 5696 - DNA, 456 bp, Cricetulus griseus
cagtgggtgtttgactgtgtgaatgcccggctcctcctccctgtggcagagtacttccctggggtgcagctgcccccacacctctcacccttcgtatctgagaaggaaggagattacattccccctgagaagctgaagctactggctctgcagcggggagaagatccaggagacttgaaagaagaagaggatgaagatgaggatgaggatgatgaagatgatgacaacgaaggtgatggtgatgtgggggaaaatgaggatgaggaagaagtggacgctgattcagagaaggaggaggaagcgcacctgtcggtcttggagcagcagaggctggaagggaagaagccccaggtggtggccggcactgtgaaactggaagacaagcagcggctggcccaggaagaagaaagtgaggccaatcgcctggccatcatgatgatgaaaaagcgggagaag

SEQ ID NO: 5697 - DNA, 176 bp, Cricetulus griseus; identical to SEQ ID NO: 2055

SEQ ID NO: 5698 - DNA, 348 bp, Cricetulus griseus
taggaacgcgggtcttcccgctgttgctgtggggaccacgggccgaacacacgatcccggcctgaggtggtggtgggaagcccaccgcactttgctgcgacgtcatggagggtggcgggggaagtggcaacaaaacctccggcgggttagctggcttcttcggagcaggaggagcgggctactcgcactctgatttggccggcgttccgcgtgagtatcaggcctagcttgctacctctctctgtctgcttcctgggacagctagaaatgtgtagcattccttgtcccctttcttgctcgcgttcacaaggttcaccgtcagtgatggggtttccagactgaacggaa

SEQ ID NO: 5699 - DNA, 581 bp, Cricetulus griseus; identical to SEQ ID NO: 2057

SEQ ID NO: 5700 - DNA, 450 bp, Cricetulus griseus; identical to SEQ ID NO: 2058

SEQ ID NO: 5701 - DNA, 490 bp, Cricetulus griseus; identical to SEQ ID NO: 2059

SEQ ID NO: 5702 - DNA, 295 bp, Cricetulus griseus; identical to SEQ ID NO: 2060

SEQ ID NO: 5703 - DNA, 578 bp, Cricetulus griseus; identical to SEQ ID NO: 2061

SEQ ID NO: 5704 - DNA, 575 bp, Cricetulus griseus; identical to SEQ ID NO: 2062
  misc_feature (521)..(521): n is a, c, g, or t

SEQ ID NO: 5705 - DNA, 212 bp, Cricetulus griseus; identical to SEQ ID NO: 2063
  misc_feature (119)..(137): n is a, c, g, or t

SEQ ID NO: 5706 - DNA, 459 bp, Cricetulus griseus; identical to SEQ ID NO: 2064

SEQ ID NO: 5707 - DNA, 556 bp, Cricetulus griseus; identical to SEQ ID NO: 2065
  misc_feature (139)..(139): n is a, c, g, or t
  misc_feature (334)..(350): n is a, c, g, or t
  misc_feature (498)..(498): n is a, c, g, or t

SEQ ID NO: 5708 - DNA, 576 bp, Cricetulus griseus; identical to SEQ ID NO: 2066

SEQ ID NO: 5709 - DNA, 474 bp, Cricetulus griseus
aacagaagctatgacccacttgggtttaacagatatctatagaacattccatccaaacacaaaagaatataccttctcagtgccacatggaaccttctctaaaatcaacacatcctcagcaacatagcaaacctcaacagatacgaaaaaattggaataaccccattgtatcttattggatcaccatggtttaaagttagaattcaacagcaacacaattgcagaaaccatacaaacacagggaaattgaacaatgcacaattacaccattcctgggtcaaggaagaaataaaaacagaaattaaagacttcctagaatccaatgagaattaagacacagcattaataaagtaaaaacaaagaatacaaagaatcactgtaacaaaagaattggttctttgagaaaatcaataagatagagaaacctttatccaaactaaccaaaaggcaaaaagagaacatgcacattaacaa

SEQ ID NO: 5710 - DNA, 339 bp, Cricetulus griseus; identical to SEQ ID NO: 2068

SEQ ID NO: 5711 - DNA, 566 bp, Cricetulus griseus; identical to SEQ ID NO: 2069
  misc_feature (140)..(240): n is a, c, g, or t

SEQ ID NO: 5712 - DNA, 454 bp, Cricetulus griseus; identical to SEQ ID NO: 2070
  misc_feature (182)..(203): n is a, c, g, or t

SEQ ID NO: 5713 - DNA, 89 bp, Cricetulus griseus
  misc_feature (38)..(38): n is a, c, g, or t
tcccttaggctgattacccattttaccaccattccagnaataccctagctgagggggcgattccttcattcagttcacccccaccattt

SEQ ID NO: 5714 - DNA, 578 bp, Cricetulus griseus; identical to SEQ ID NO: 2072

SEQ ID NO: 5715 - DNA, 158 bp, Cricetulus griseus
atgacttaccattctatccatagattaatgcatccctcaactgtcatcagagaggcttctttacacagtagatggtaaagagacccacaactgtccaagtaagaaaataaaagtaagagacccagaatgggcagcttttaattaatggatcacatcaa

SEQ ID NO: 5716 - DNA, 580 bp, Cricetulus griseus; identical to SEQ ID NO: 2074

SEQ ID NO: 5717 - DNA, 572 bp, Cricetulus griseus; identical to SEQ ID NO: 2075

SEQ ID NO: 5718 - DNA, 579 bp, Cricetulus griseus; identical to SEQ ID NO: 2076

SEQ ID NO: 5719 - DNA, 579 bp, Cricetulus griseus; identical to SEQ ID NO: 2077

SEQ ID NO: 5720 - DNA, 448 bp, Cricetulus griseus; identical to SEQ ID NO: 2078

SEQ ID NO: 5721 - DNA, 579 bp, Cricetulus griseus; identical to SEQ ID NO: 2079

SEQ ID NO: 5722 - DNA, 508 bp, Cricetulus griseus; identical to SEQ ID NO: 2080

SEQ ID NO: 5723 - DNA, 512 bp, Cricetulus griseus; identical to SEQ ID NO: 2081

SEQ ID NO: 5724 - DNA, 578 bp, Cricetulus griseus; identical to SEQ ID NO: 2082

SEQ ID NO: 5725 - DNA, 504 bp, Cricetulus griseus; identical to SEQ ID NO: 2083

SEQ ID NO: 5726 - DNA, 578 bp, Cricetulus griseus; identical to SEQ ID NO: 2084

SEQ ID NO: 5727 - DNA, 578 bp, Cricetulus griseus; identical to SEQ ID NO: 2085

SEQ ID NO: 5728 - DNA, 167 bp, Cricetulus griseus; identical to SEQ ID NO: 2086

SEQ ID NO: 5729 - DNA, 500 bp, Cricetulus griseus; identical to SEQ ID NO: 2087
  misc_feature (42)..(62): n is a, c, g, or t
  misc_feature (444)..(463): n is a, c, g, or t

SEQ ID NO: 5730 - DNA, 580 bp, Cricetulus griseus; identical to SEQ ID NO: 2088
  misc_feature (468)..(492): n is a, c, g, or t

SEQ ID NO: 5731 - DNA, 577 bp, Cricetulus griseus
cagatcgacatacccgatgcactcagtgaaagagataaggtcaagtttacagtacacaccaagaccacactgcccacattccagagcccagaattttctgttacaaggcagcatgaagactttgtgtggctgcatgacactcttacagaaacaacagattatgccgggcttattatccctcctgctcctacaaagccagacttcgatggccctcgagagaagatgcagaaactgggagaaggtgaaggatctatgacaaaagaagagtttgctaagatgaagcaagaactggaagctgagtatctcgctgtctttaagaagactgtgtcttcccatgaagtctttcttcagcggctttcttctcaccctgttctcagtaaagaccgaaactttcatgttttcctggaatatgatcaggatgtaaggcaatttttccattttcatagttgaaatacttctaaaatgagcttcttgagtttgaatttatcaatacagagaaaaaggtggagaagcaatgctttcccttcctgcttaaatccatttaaaggtcacttttaaaagctactgaaagaaaaca

SEQ ID NO: 5732 - DNA, 553 bp, Cricetulus griseus; identical to SEQ ID NO: 2090

SEQ ID NO: 5733 - DNA, 486 bp, Cricetulus griseus; identical to SEQ ID NO: 2091
  misc_feature (60)..(129): n is a, c, g, or t
  misc_feature (152)..(204): n is a, c, g, or t
  misc_feature (233)..(279): n is a, c, g, or t
  misc_feature (300)..(319): n is a, c, g, or t
  misc_feature (321)..(369): n is a, c, g, or t
  misc_feature (380)..(406): n is a, c, g, or t
  misc_feature (426)..(448): n is a, c, g, or t

SEQ ID NO: 5734 - DNA, 243 bp, Cricetulus griseus
gaaagttatccgtaaaaacattgcgaagaagtgccctgagctcttctctgagctggctgaagacaagaaaactataagaaattctacgaggccttctccaagaacttaaagcttgcaatccatgatgattcccttaatccgtcggcgttctctcttgactgttgcgctatcatacctctccagctgggagatgaaatgacttccctgtccgaaaatgtgtgccgtgttgtaggagacccaaaa

SEQ ID NO: 5735 - DNA, 578 bp, Cricetulus griseus; identical to SEQ ID NO: 2093
  misc_feature (111)..(137): n is a, c, g, or t

SEQ ID NO: 5736 - DNA, 211 bp, Cricetulus griseus; identical to SEQ ID NO: 2094
  misc_feature (120)..(120): n is a, c, g, or t
  misc_feature (135)..(135): n is a, c, g, or t

SEQ ID NO: 5737 - DNA, 581 bp, Cricetulus griseus; identical to SEQ ID NO: 2095
  misc_feature (62)..(213): n is a, c, g, or t
  misc_feature (231)..(300): n is a, c, g, or t
  misc_feature (303)..(437): n is a, c, g, or t
  misc_feature (439)..(461): n is a, c, g, or t
  misc_feature (477)..(493): n is a, c, g, or t
  misc_feature (495)..(507): n is a, c, g, or t

SEQ ID NO: 5738 - DNA, 509 bp, Cricetulus griseus; identical to SEQ ID NO: 2096
  misc_feature (240)..(264): n is a, c, g, or t

SEQ ID NO: 5739 - DNA, 396 bp, Cricetulus griseus; identical to SEQ ID NO: 2097

SEQ ID NO: 5740 - DNA, 546 bp, Cricetulus griseus
  misc_feature (123)..(154): n is a, c, g, or t
cgtggaggagggcgaggaaacctgcgtcttgtcctcacacagcgggactgcgggctccaagtcggggggcgacaagatgttctccctcaagaagtggaacgcggtagccatgtggagctgggnnnnnnnnnnnnnnnnnnnnnnnnnnnnnnnngtccaggtgatggatgcctgcctcagatgtcaagccgaaaacaaacaagaggactgtgttgtggtctggggagaatgtaatcattcctttcacaactgctgcatgtctctgtgggtgaaacagaacaatcgctgtcctctctgccagcaggactgggtggtccaaagaattggcaaatgagaggtagtagaaggctttcctggtgtggttgtgaccctggatgatcttgctgccaagtgaccggacgaaggctataacactccagcggatcagttcttcagatagaaagggtgcagtcttttgagactcatccagggcatggcttagcattttgtcagttgaattttgagaagttgtctacaagatagataatttattaaaaatggcctttc

SEQ ID NO: 5741 - DNA, 507 bp, Cricetulus griseus; identical to SEQ ID NO: 2099

SEQ ID NO: 5742 - DNA, 581 bp, Cricetulus griseus; identical to SEQ ID NO: 2100
  misc_feature (309)..(323): n is a, c, g, or t

SEQ ID NO: 5743 - DNA, 581 bp, Cricetulus griseus
  misc_feature (259)..(273): n is a, c, g, or t
taaaacaaaaagaaagcattcattctggaaataaactatattatctttgtaaatcaattgagtatataaagtacttgctaattattcctgaaggattggtagaggaggctttagcttctttctttagagtcaaagaaaggtactttgagggtagtaaatacttttaggaattaaaaaaataattcacaaacattgaacgtattttcctagcatgtctatttttgatctgaaatacttaaatactgacatagaaatggannnnnnnnnnnnnnnagacttcaaagttaaatgaggcgaaatatcatgggtagctggattagatgtcagttacaacccaaatgtgattttcaagtggactttgaatgtccctaaggatgagatgggagatgatgaattctcaatgcctcacctaatgcactgaaaagatgcatttactgccttttttgttttctgcctctgacttgtctttgtccagattcctttccctaagaacagtatttctgttaggatcagataaactacataccatccgagtccacagggtcttccacttcctctgtgtaattcacttctgtcctcac

SEQ ID NO: 5744 - DNA, 579 bp, Cricetulus griseus; identical to SEQ ID NO: 2102
  misc_feature (530)..(530): n is a, c, g, or t

SEQ ID NO: 5745 - DNA, 442 bp, Cricetulus griseus; identical to SEQ ID NO: 2103

SEQ ID NO: 5746 - DNA, 442 bp, Cricetulus griseus
aaaacactttgtcctcatgtggttatcacgtaagatcacaaagcaagtcagtgttagagccaggactaaaagcgaatgtaagcctggtgatccaaatcttccactgaaactaacctctgaagggagtcagtcccaggagactgggcatacaaatgacctcccaggtttgcagaactccaatgtgggcattcccaagcaggcacggcccatgaggctccattgtgtagcaagatgtacactcagtctcgcacagacattgtgtttttaggatgggtccagcaccaggttgccatctttggaaatagcttacttttgagtcatgagactgacttatctgtacatggattcagacatgcagtttaatatccctgtttagagacctgaggagaactggatgtgggtcagagaatggagaattaaatgtatatgagataaagaccaa

SEQ ID NO: 5747 - DNA, 499 bp, Cricetulus griseus; identical to SEQ ID NO: 2105

SEQ ID NO: 5748 - DNA, 506 bp, Cricetulus griseus; identical to SEQ ID NO: 2106

SEQ ID NO: 5749 - DNA, 435 bp, Cricetulus griseus; identical to SEQ ID NO: 2107

SEQ ID NO: 5750 - DNA, 579 bp, Cricetulus griseus; identical to SEQ ID NO: 2108

SEQ ID NO: 5751 - DNA, 578 bp, Cricetulus griseus; identical to SEQ ID NO: 2109

SEQ ID NO: 5752 - DNA, 555 bp, Cricetulus griseus; identical to SEQ ID NO: 2110
  misc_feature (524)..(524): n is a, c, g, or t

SEQ ID NO: 5753 - DNA, 498 bp, Cricetulus griseus; identical to SEQ ID NO: 2111

SEQ ID NO: 5754 - DNA, 81 bp, Cricetulus griseus; identical to SEQ ID NO: 2112
  misc_feature (41)..(41): n is a, c, g, or t

SEQ ID NO: 5755 - DNA, 567 bp, Cricetulus griseus; identical to SEQ ID NO: 2113
  misc_feature (28)..(47): n is a, c, g, or t
  misc_feature (54)..(86): n is a, c, g, or t
  misc_feature (88)..(124): n is a, c, g, or t

SEQ ID NO: 5756 - DNA, 579 bp, Cricetulus griseus; identical to SEQ ID NO: 2114

SEQ ID NO: 5757 - DNA, 556 bp, Cricetulus griseus; identical to SEQ ID NO: 2115
  misc_feature (357)..(396): n is a, c, g, or t
  misc_feature (398)..(418): n is a, c, g, or t

SEQ ID NO: 5758 - DNA, 442 bp, Cricetulus griseus; identical to SEQ ID NO: 2116
  misc_feature (143)..(160): n is a, c, g, or t

SEQ ID NO: 5759 - DNA, 464 bp, Cricetulus griseus
  misc_feature (399)..(399): n is a, c, g, or t
ttatctcgctcaaatcttctcctctttaggaacggaggggtaatctaactcctgaggaaagagatgcaaggacagttttctgcatgcaactggcagcaagaattcgaccaagggatttggaagagtttttctctacagtaggaaaggttcgagatgtgaggatgatttctgatagaaattcaagacgttccaaaggaattgcctatgtggaatttgttgatgttagttcagtgcctctagcaattggattaactggccaacgtgttttatgagtgccaattatagtacaggcatcacaggtaacttcttgatttagatattggtcattgagctgggtgtcacatcatatgcagcagtggcttatggttaggcaggagaattggaatcaatttgactcancttgggctatgtattaattattcattaacagacctaataagtggaatcaatgagatgggagttta

SEQ ID NO: 5760 - DNA, 316 bp, Cricetulus griseus; identical to SEQ ID NO: 2118
  misc_feature (38)..(93): n is a, c, g, or t
  misc_feature (107)..(139): n is a, c, g, or t
  misc_feature (154)..(173): n is a, c, g, or t
  misc_feature (184)..(243): n is a, c, g, or t

SEQ ID NO: 5761 - DNA, 215 bp, Cricetulus griseus
tccgcctgcctttgcctcccaattgcgggggttaaaggcatttccctcctacaccacctggctaaaaattgatttttgaaattatgcgttaatgggtatctgggggtaggtaattatggatgcccaaggaaaccaaaggaaggggttgattccctggggctggatttagagggggttgggccacctggggggaaccgaactcaggtcctttgaaa

SEQ ID NO: 5762 - DNA, 492 bp, Cricetulus griseus; identical to SEQ ID NO: 2120
  misc_feature (396)..(396): n is a, c, g, or t

SEQ ID NO: 5763 - DNA, 567 bp, Cricetulus griseus; identical to SEQ ID NO: 2121

SEQ ID NO: 5764 - DNA, 567 bp, Cricetulus griseus; identical to SEQ ID NO: 2122

SEQ ID NO: 5765 - DNA, 578 bp, Cricetulus griseus; identical to SEQ ID NO: 2123

SEQ ID NO: 5766 - DNA, 434 bp, Cricetulus griseus; identical to SEQ ID NO: 2124

SEQ ID NO: 5767 - DNA, 550 bp, Cricetulus griseus
gcttgtctgttctgaggagcagtaggcagtttcctccgtccgatatctcgcataccgaagtgcgcgtctccacctcatggaagactcgatggacatggacatgagccctcttaggccacagaactaccttttcggttgtgaactaaaagctgacaaagattatcactttaaggtggataatgatgagaatgaacaccagttgtcactaagaacggttagtttaggggcaggggcaaaagatgaattacacatcgtagaggcagaagcaatgaattatgaaggcagtccaattaaagtaacgctggcaacattgaaaatgtccgtacaaccaacagtttcccttggtggctttgaaattacaccacctgtggtgttacagttgaagtgtggttcaaggcctgtgcacattagtggacagcatctagtagctgtagaggaagatgcagagtcagaggatgaagatgaggaggatgtgaaactcttaagtatgtctggcaagcgatctgctcctggaggtggtagcaaagttccacagaaaaaagtaaaaatc

SEQ ID NO: 5768 - DNA, 474 bp, Cricetulus griseus; identical to SEQ ID NO: 2126
  misc_feature (342)..(342): n is a, c, g, or t
  misc_feature (411)..(411): n is a, c, g, or t

SEQ ID NO: 5769 - DNA, 579 bp, Cricetulus griseus; identical to SEQ ID NO: 2127

SEQ ID NO: 5770 - DNA, 578 bp, Cricetulus griseus; identical to SEQ ID NO: 2128

SEQ ID NO: 5771 - DNA, 579 bp, Cricetulus griseus; identical to SEQ ID NO: 2129

SEQ ID NO: 5772 - DNA, 303 bp, Cricetulus griseus; identical to SEQ ID NO: 2130
  misc_feature (187)..(187): n is a, c, g, or t

SEQ ID NO: 5773 - DNA, 580 bp, Cricetulus griseus; identical to SEQ ID NO: 2131

SEQ ID NO: 5774 - DNA, 574 bp, Cricetulus griseus
ctgtagaagacttccctacagagaaccctaacgataactctgtgctagggaacctgcgttctctgctccagatcttgcgccaagatatgactccaggaggtcattcagggggccgccgtcgccagcggggccgctcggtgcgtcgtctggttcgccgtctccgtcgttggggcctacttcctcgaaccaataccccagctcggacccctgagaccagatcccaggtcacagcatctgctgctccctctgaggccctggatgacagcacaggccaaagctgtgagggcggagcagtaggaggacaggatggggagcaggctcctccactacccgtcaagccccccatcccaaccccaagcacacttccagcccttgctactgtctctgagcccccaggacctctcccctcagtgcctctagaaccctcactgctgtctggagttgtacaggtcctccgaggccgtctgctacccagcctgtggcccccatgacccacttggaccccagctggacatcacacaacagtcctggccccaaaggatgaggatgatgtgttgttaatgccgctggctga

SEQ ID NO: 5775 - DNA, 90 bp, Cricetulus griseus
gaaccccaaatacggaaaattgtggatcaaataagacctgataggcaaaccctaatgtggagtgcaacttggccaaaagaagtaagacag

SEQ ID NO: 5776 - DNA, 578 bp, Cricetulus griseus; identical to SEQ ID NO: 2134

SEQ ID NO: 5777 - DNA, 540 bp, Cricetulus griseus
acatttgccagcctctacgcacaagcctgaaaggtcctatggaaacactccatgtggctctgggctcttctctgattgctatgagtttaattctaatctttacaggatggatgtcagtgtcagcactttcttaattatgagtattggaagacactggaatctccatgtgtccaatgacaaggaactttacatttcatttgattttattctttgattttaagccttattttcacaaaacagcctagctggaatattgatgccatactgtattttgcatgctgctttcttccctagaggcattgagggcaactgtacttggtaacttttgctctctcaagatttgtcattttttcagccattcttcatgcccatgccagcaagagcttttatatcataatgataaagccagctcatacttatttgtccctgtaggtggtggtagtggtcagaaatggcttcaggcatccatgagtttcaagcttcagaagtacctggcaccttaatccaagcaaaaatatgacagcttataaaaacaaccaa

SEQ ID NO: 5778 - DNA, 383 bp, Cricetulus griseus; identical to SEQ ID NO: 2136

SEQ ID NO: 5779 - DNA, 570 bp, Cricetulus griseus; identical to SEQ ID NO: 2137
  misc_feature (69)..(101): n is a, c, g, or t
  misc_feature (114)..(145): n is a, c, g, or t
  misc_feature (147)..(184): n is a, c, g, or t
  misc_feature (222)..(240): n is a, c, g, or t
  misc_feature (242)..(263): n is a, c, g, or t
  misc_feature (267)..(289): n is a, c, g, or t
  misc_feature (295)..(337): n is a, c, g, or t
  misc_feature (344)..(370): n is a, c, g, or t
  misc_feature (385)..(415): n is a, c, g, or t
  misc_feature (427)..(444): n is a, c, g, or t

SEQ ID NO: 5780 - DNA, 578 bp, Cricetulus griseus; identical to SEQ ID NO: 2138
  misc_feature (87)..(108): n is a, c, g, or t

SEQ ID NO: 5781 - DNA, 451 bp, Cricetulus griseus
tcgaccccacgcccgctccggtgaatggctgcactctggcatgtggtatgcgagatgacatctctgagattatggcgaaaccacattacacacgagcgccgcatgtgcatgccctctgcacatggagaatgagcctggtgcaatccataggcagagagatgccctccggggtgcagtcctaaatggaggcccccccagcacccgtataacaccttgattctctaaatgggctagtgatgagatgccgtccactaacactggggaaagcaacctgcaagaggccatgctgaagacctgcaagaacagggacatgtgagaaaatcactgaagattccgctgctactacatttgatgccctgaacgctcgtgtcacggagcttgaacggcagctatctcgggggggccgatacaaatgcctcatttgcatggactcatactcgatgcccctgac

SEQ ID NO: 5782 - DNA, 574 bp, Cricetulus griseus; identical to SEQ ID NO: 2140

SEQ ID NO: 5783 - DNA, 580 bp, Cricetulus griseus; identical to SEQ ID NO: 2141

SEQ ID NO: 5784 - DNA, 330 bp, Cricetulus griseus; identical to SEQ ID NO: 2142

SEQ ID NO: 5785 - DNA, 579 bp, Cricetulus griseus; identical to SEQ ID NO: 2143

SEQ ID NO: 5786 - DNA, 334 bp, Cricetulus griseus; identical to SEQ ID NO: 2144
  misc_feature (81)..(98): n is a, c, g, or t
  misc_feature (222)..(239): n is a, c, g, or t

SEQ ID NO: 5787 - DNA, 305 bp, Cricetulus griseus
  misc_feature (61)..(61): n is a, c, g, or t
gtctccgcctccgccggcggggaccccaagctaccacgactgcgggacccacagccctgcnagatacggagccacgatgttcccgagggagaccaagtggaacatctcgttcgctccctgcggcttcctcggcgtctaccacattggcggggcctcctgcctccgtgagcacgcgcccttcctggtggccaacgccaaccacatctacggcgcctcggccggtgcgctcaccgccacggctctggtcactggggcctgcctgggtgaagcagcggcaaacattattgatgtgtccaaggaggccc

SEQ ID NO: 5788 - DNA, 536 bp, Cricetulus griseus; identical to SEQ ID NO: 2146

SEQ ID NO: 5789 - DNA, 495 bp, Cricetulus griseus
acccacgtcgttccgtcccacgtcgttccgtcccacgtccgtccgggaaaaaccaggaagtctccaagtcgggatctgtgaaggaccggatatcgggaagttcaaagcgttcgttggaggggagcgatgactacgggaaggcgcagatatccaaaagcagcagcaaggaatccaggtcatccaaactccacaaggagaagacacgcaaggaacgtgagttaaagtctggacacaaggaccgcagcaaaagccatcggaagagggaaacacccaaaagttacaaaacggtagatagccccaaacggaggtccaggagtccccataggaagtggtctgacagctccaagcaagatgacagcccttcgggagcttcttatggccaagactatgaccttagccccccgaggtctcacacctctagcaattatgactcctacaagaagagtcctggcggtacctcaagaaggcagtcaatcagtccaccctacaaagagc

SEQ ID NO: 5790 - DNA, 310 bp, Cricetulus griseus; identical to SEQ ID NO: 2148

SEQ ID NO: 5791 - DNA, 578 bp, Cricetulus griseus; identical to SEQ ID NO: 2149

SEQ ID NO: 5792 - DNA, 579 bp, Cricetulus griseus; identical to SEQ ID NO: 2150

SEQ ID NO: 5793 - DNA, 580 bp, Cricetulus griseus; identical to SEQ ID NO: 2151
  misc_feature (200)..(220): n is a, c, g, or t
  misc_feature (459)..(482): n is a, c, g, or t

SEQ ID NO: 5794 - DNA, 374 bp, Cricetulus griseus; identical to SEQ ID NO: 2152
  misc_feature (150)..(167): n is a, c, g, or t
  misc_feature (205)..(251): n is a, c, g, or t

SEQ ID NO: 5795 - DNA, 491 bp, Cricetulus griseus; identical to SEQ ID NO: 2153
  misc_feature (120)..(142): n is a, c, g, or t

SEQ ID NO: 5796 - DNA, 400 bp, Cricetulus griseus; identical to SEQ ID NO: 2154
  misc_feature (342)..(342): n is a, c, g, or t

SEQ ID NO: 5797 - DNA, 579 bp, Cricetulus griseus; identical to SEQ ID NO: 2155

SEQ ID NO: 5798 - DNA, 410 bp, Cricetulus griseus
agagaaagtgacgttgttgatgtgatggagaagtgcgatgacggatggttcgtgggaacctcaagaagaaccaaattctttggtacctttcccggaaactatgtcaagaggctgtgaatcaccttcctccttatttactccacatttcaacaacacatctgcagaactcacctgaaatgtccccgcaggcctgttgctgtcttgccttatggtttccacaggccatctccatctccacctgctgccaccagatcaccagcagtgactgccgctgggagcttcaaggaaatgtggcaaatttacaccctcataaatgcagtttcctgctttctgccctgaacttttaaatgtctgtgatatggaataagaatgaaagtcatcataattttaaaaagtggaatagttgaggc

SEQ ID NO: 5799 - DNA, 481 bp, Cricetulus griseus; identical to SEQ ID NO: 2157
  misc_feature (31)..(46): n is a, c, g, or t
  misc_feature (83)..(101): n is a, c, g, or t

SEQ ID NO: 5800 - DNA, 580 bp, Cricetulus griseus; identical to SEQ ID NO: 2158

SEQ ID NO: 5801 - DNA, 160 bp, Cricetulus griseus
agtgtgcctttgagagccctcggtcatattaacttcagtcatttggctggcctcgctcgtgtgagagttctgggcactgctctgcttctttctgcacagagcttcctgttcatcttcccccacgccacgcagcagagagcattcattgtcatgcctgttt

SEQ ID NO: 5802 - DNA, 523 bp, Cricetulus griseus; identical to SEQ ID NO: 2160

SEQ ID NO: 5803 - DNA, 520 bp, Cricetulus griseus; identical to SEQ ID NO: 2161

SEQ ID NO: 5804 - DNA, 384 bp, Cricetulus griseus; identical to SEQ ID NO: 2162

SEQ ID NO: 5805 - DNA, 416 bp, Cricetulus griseus
cttgtacattctaggtcagcctgttctacattgtaagtttgagaccagccaagactacatagtgagagtctgtctctaaaaaccaaaacaaataaaaccccacaaagacaactactactaatgcatataacacttaaaaaattttagatgcattgtgctaaatacaagaagtcactacatattctacgattctatttgagtaaactcaggaaaaggcgagacttagggcagaaaacatgttgggtagttgaaggagaagggtttaccagaggagcattggggacttagaggaggggcaatctgattgttctatttcttgattactatgattatataagtgcttatttaaaacacacaggatcacaataccacataacacctgacattctctcctggcctctgtacacctccatgca

SEQ ID NO: 5806 - DNA, 568 bp, Cricetulus griseus; identical to SEQ ID NO: 2164
  misc_feature (363)..(377): n is a, c, g, or t

SEQ ID NO: 5807 - DNA, 550 bp, Cricetulus griseus
cacttggcagatgctgagggttgggaaggcaaaagcagacgtgtggcccaaaactgctccaaagaaaggtgagagccgggcagggaacaggtgagttaggagcagccctttcaataacagttctagacttttcacttttgtttttagatgagaacagcttggttcctccggcccctgtggacagcgatggggagagtgataactctgaccgtgttcctgtgcccagtttccagaattccttcagccaagctattgaagcagccttcatgaaattggacacaccagctacttcagatgccctctctggtaagagcggggaactcactcagcactgggctcaggctcagccatatatgccactgttcctgtcagtattggtagcagtagtaatgactcaggctcttagccactggaccatctgtccagcctacacttaagagttggttgagggtgatgggcaatgttaacctcagtgcctgagacacctgtgctccttaggcagggatggggtagcagtgaaattccaaagcctgcactcactcagctgtga

SEQ ID NO: 5808 - DNA, 579 bp, Cricetulus griseus; identical to SEQ ID NO: 2166
  misc_feature (314)..(332): n is a, c, g, or t
  misc_feature (442)..(456): n is a, c, g, or t
  misc_feature (481)..(496): n is a, c, g, or t

SEQ ID NO: 5809 - DNA, 579 bp, Cricetulus griseus; identical to SEQ ID NO: 2167

SEQ ID NO: 5810 - DNA, 568 bp, Cricetulus griseus
tttctgcgccccagtccgcggaatgacccgctcgcggctcgccgcctcggccgcccacgacccctagacaccgacacccgccctaggatcaaaccactggcgcagaccggtcccgccacgccgagcctgtggtccgttctaagggcggctcgcctgaggatttgtagatactgagtcgaagttggggctaatccacatcatggaaatggaaaccactgaacctgagccagactgtgtagtacagcctccctctcctcctgacgacttttcatgccaaatgagaatctctgagaagatcagtccattgaaaacttggtttaagaaaaaacaggatcagaaacgattgggaactggaaccctgaggtctttgagaccaatattaaatactttgctagaatctggctcgcttgatggagtttttagagctagagaccaaaatgcagatgagagcagcttacatgaacgtatggtgaaaaaacccctggaactcaacccatcatgttcaccagcagaaaacagtatgtctgtcctgattcctgatgagacaaatgttgagggccagttacca

SEQ ID NO: 5811 - DNA, 338 bp, Cricetulus griseus; identical to SEQ ID NO: 2169

SEQ ID NO: 5812 - DNA, 528 bp, Cricetulus griseus; identical to SEQ ID NO: 2170

SEQ ID NO: 5813 - DNA, 467 bp, Cricetulus griseus; identical to SEQ ID NO: 2171
  misc_feature (98)..(122): n is a, c, g, or t
  misc_feature (199)..(219): n is a, c, g, or t

SEQ ID NO: 5814 - DNA, 421 bp, Cricetulus griseus; identical to SEQ ID NO: 2172

SEQ ID NO: 5815 - DNA, 510 bp, Cricetulus griseus; identical to SEQ ID NO: 2173

SEQ ID NO: 5816 - DNA, 461 bp, Cricetulus griseus; identical to SEQ ID NO: 2174
  misc_feature (106)..(135): n is a, c, g, or t
  misc_feature (141)..(159): n is a, c, g, or t
  misc_feature (161)..(174): n is a, c, g, or t

SEQ ID NO: 5817 - DNA, 461 bp, Cricetulus griseus
  misc_feature (288)..(301): n is a, c, g, or t
  misc_feature (303)..(321): n is a, c, g, or t
  misc_feature (327)..(356): n is a, c, g, or t
ttactgtccttgctgtgtaaaccaagctggcctttaactcaaagagatctgctgcctcttcctcctgagtgctaggattaaaggtatgagttatggggggaggaaggggcccaatgacacaagaactcaggacccacatgctcatatgcccttatctcctaggttctaggactaaaggaatgcaaaaccacatctggataggtctttattttattttattttttttttggtttttcaagacagggtttctctgtgtagctttggagcctatcctggaactcgttctgnnnnnnnnnnnnnntnnnnnnnnnnnnnnnnnnncctgannnnnnnnnnnnnnnnnnnnnnnnnnnnnnatgtgccaccaatgcccggcttagatctttaatttttgaacattgtagctcaggctggcttggagcttacgctgtagcccaggctggctttgagctcactctgta

SEQ ID NO: 5818 - DNA, 505 bp, Cricetulus griseus; identical to SEQ ID NO: 2176

SEQ ID NO: 5819 - DNA, 523 bp, Cricetulus griseus; identical to SEQ ID NO: 2177

SEQ ID NO: 5820 - DNA, 459 bp, Cricetulus griseus; identical to SEQ ID NO: 2178

SEQ ID NO: 5821 - DNA, 580 bp, Cricetulus griseus; identical to SEQ ID NO: 2179

SEQ ID NO: 5822 - DNA, 510 bp, Cricetulus griseus; identical to SEQ ID NO: 2180

SEQ ID NO: 5823 - DNA, 520 bp, Cricetulus griseus
  misc_feature (28)..(80): n is a, c, g, or t
  misc_feature (88)..(144): n is a, c, g, or t
  misc_feature (147)..(159): n is a, c, g, or t
  misc_feature (189)..(228): n is a, c, g, or t
  misc_feature (250)..(275): n is a, c, g, or t
  misc_feature (288)..(372): n is a, c, g, or t
tccgactacaacatccagaaggagtctnnnnnnnnnnnnnnnnnnnnnnnnnnnnnnnnnnnnnnnnnnnnnnnnnnnnncctgacannnnnnnnnnnnnnnnnnnnnnnnnnnnnnnnnnnnnnnnnnnnnnnnnnnnnnnnnaannnnnnnnnnnnngagggcattccccctgaccagcagaggtcnnnnnnnnnnnnnnnnnnnnnnnnnnnnnnnnnnnnnnnntccgactacaacatccagaagnnnnnnnnnnnnnnnnnnnnnnnnnnactgatgggtggnnnnnnnnnnnnnnnnnnnnnnnnnnnnnnnnnnnnnnnnnnnnnnnnnnnnnnnnnnnnnnnnnnnnnnnnnnnnnnnnnnnnnaagatccaagacaaggatggcattccccctgaaaacagacgtgcatctttgcccgcaatcagctggaagatggcggcaccctgtccgactacaacatccagaaggagtccaccctgcacctggttctacgcctcatgggtgggatgca

SEQ ID NO: 5824 - DNA, 519 bp, Cricetulus griseus; identical to SEQ ID NO: 2182

SEQ ID NO: 5825 - DNA, 578 bp, Cricetulus griseus; identical to SEQ ID NO: 2183

SEQ ID NO: 5826 - DNA, 475 bp, Cricetulus griseus
acaaaagtggttgagagagagtacctgggagaattgggagaagctctagagaggaaatgggaggaagaaagcgatggaattctattttaattaagactgcattaggcctaaaacattttttccttagatttaaatgtctaagatctgggaacatatctgtaacagagaactttcccagcatgtgcaaagttctggctttgattcccaataccaccaatgtgggatatttaaatatctaaattatgaacaagtggagagaatcataataaactgttatgtaaattaaaggctcaaatgttcctatgttctcattctgaaggtaactgtttaggaactagatagtgatgcatgccaataatcctgacacttgagcaactaaggcaatcacatatttaatcccagtttgggttatatatctgtatttaaaaaaaaaaagttttggccaggcagtggtggtgcatgcctctaatcccaa

SEQ ID NO: 5827 - DNA, 536 bp, Cricetulus griseus; identical to SEQ ID NO: 2185
  misc_feature (108)..(125): n is a, c, g, or t

SEQ ID NO: 5828 - DNA, 492 bp, Cricetulus griseus; identical to SEQ ID NO: 2186

SEQ ID NO: 5829 - DNA, 568 bp, Cricetulus griseus; identical to SEQ ID NO: 2187

SEQ ID NO: 5830 - DNA, 484 bp, Cricetulus griseus
tcaaaatgaacaaagtgagtagaaagaaggtagctgatgatttgcataaggctcaacagtcactgaactttatccactcaaaaattgcactaaaagctgctggagacaatgctgttattgggaatagtagtgtttccccagaaacgggagctcctgagaaagagacaatgtctgtgagtctgaatcagactgtggtccagttacagcaactgcttcaggaagtcaatcagcaactcatgaaggagaagtgatcctggctgtgggagtgaagtcattggaaattactcgaaggcgttgtattatattttgccaaatgaaagccttatttatgtttcaccctttctactttgtcacacactgaacagttttgtcttttctaaccttgttagactactgacttacagagaaaacacttaaaaagccaactctgtagacacctccagagtttagttttataataaactgtttgaattaatagacctga

SEQ ID NO: 5831 - DNA, 449 bp, Cricetulus griseus; identical to SEQ ID NO: 2189

SEQ ID NO: 5832 - DNA, 579 bp, Cricetulus griseus; identical to SEQ ID NO: 2190
  misc_feature (532)..(547): n is a, c, g, or t

SEQ ID NO: 5833 - DNA, 548 bp, Cricetulus griseus
  misc_feature (269)..(283): n is a, c, g, or t
cagtatgtcaaggcggcctcttacctgctttccatccacaaagtgtatgaagctgtggaacttctcaagtcaaatcatttctacagagaagctattgcagttgccaaggctcggctgcgccctgatgaccccgttctgaatgacctggacctgagctggggttccatcctggagagagatggccactacgctattgcagccaagtgctacttaggagccacttccgcctatgatgcagccaaagttctggccagaaaaggagatgcagnnnnnnnnnnnnnnnctgcagagctggcttccatagcaggagaaagtgagctggctgcttccctggctctcagatgtgcccaggagctgcttctggtgaagaactgggtgggcgcacaggaagccttgcggcttcatgaaagcttgcagggccagagactggtcttctgcctccttgagcttctgtgccggcacttagaggaaaagcagcctccagaggtcagaagcccctcctccgtttaccaccagtgggccacaagctctgaaggaaccttggtgca

SEQ ID NO: 5834 - DNA, 576 bp, Cricetulus griseus
  misc_feature (488)..(488): n is a, c, g, or t
agtaggggctgcttcttccactcagcaattttggggaggcctgagctgtgctgtccttctgagcctttgtctcttgagggcctttgttcatcctggccgctcagcagctctaagtacacacacgcacacgcacgcacgcatgtgtacacacatgtatgcatgcatgcacgcacacacactcacaaaccaaccagaggtctaggaaaggacagccacttcctgtaggcttcagctctgcatacagatgacaggagtagaaatacaggccaagttccctacggtgacctcaggttggcctcagagctcatgtgtcagttcctaacccatctttgtttataaacaccagaatttctgcctcacccgtaggcagtttattagtgagtagagccagttaagaaccactttcaatacctggaaactttctaaaagtctttggtaatgtgagaagcaactaacagaagagcagggcataacttccttttggcctncgtttgccagtcactccctctccatttgcctacgtcctgctcatcagctcatatctgatactgcaggcagcttactgtttcctttcta

SEQ ID NO: 5835 - DNA, 474 bp, Cricetulus griseus; identical to SEQ ID NO: 2193

SEQ ID NO: 5836 - DNA, 525 bp, Cricetulus griseus; identical to SEQ ID NO: 2194

SEQ ID NO: 5837 - DNA, 491 bp, Cricetulus griseus; identical to SEQ ID NO: 2195
  misc_feature (149)..(168): n is a, c, g, or t

SEQ ID NO: 5838 - DNA, 525 bp, Cricetulus griseus; identical to SEQ ID NO: 2196
  misc_feature (42)..(42): n is a, c, g, or t

SEQ ID NO: 5839 - DNA, 441 bp, Cricetulus griseus; identical to SEQ ID NO: 2197
  misc_feature (355)..(410): n is a, c, g, or t

SEQ ID NO: 5840 - DNA, 438 bp, Cricetulus griseus; identical to SEQ ID NO: 2198
  misc_feature (254)..(279): n is a, c, g, or t

SEQ ID NO: 5841 - DNA, 523 bp, Cricetulus griseus; identical to SEQ ID NO: 2199

SEQ ID NO: 5842 - DNA, 438 bp, Cricetulus griseus; identical to SEQ ID NO: 2200

SEQ ID NO: 5843 - DNA, 422 bp, Cricetulus griseus
  misc_feature (83)..(83): n is a, c, g, or t
tggcatgattgaagaaataattcataggcagcagggaaccccatccatcaacattcttaagtcaagaaagggacttagctttnctagggtaggctctctataagagtacctggtcaatgtcagcgcaatggcgtttatcctttgaaagaccatgtttatggtagacttaagtggcattcagtatcatggtatccagtagctataaattttctccaatattttttcagacacatggtactacaaactcaaatgttttgcccttatctggtacatcagattcatggatcagataatctgttcaccccaaagggtagagatatcatgcccaataatataaaacttatccttggttcctcaaagattatagtgaaatattttcaggctaatgtagagtataggtggcaatacttggagtaaacctt

SEQ ID NO: 5844 - DNA, 250 bp, Cricetulus griseus; identical to SEQ ID NO: 2202

SEQ ID NO: 5845 - DNA, 404 bp, Cricetulus griseus; identical to SEQ ID NO: 2203

SEQ ID NO: 5846 - DNA, 107 bp, Cricetulus griseus; identical to SEQ ID NO: 2204

SEQ ID NO: 5847 - DNA, 579 bp, Cricetulus griseus; identical to SEQ ID NO: 2205

SEQ ID NO: 5848 - DNA, 568 bp, Cricetulus griseus; identical to SEQ ID NO: 2206

SEQ ID NO: 5849 - DNA, 429 bp, Cricetulus griseus; identical to SEQ ID NO: 2207
  misc_feature (371)..(385): n is a, c, g, or t

SEQ ID NO: 5850 - DNA, 429 bp, Cricetulus griseus
  misc_feature (45)..(59): n is a, c, g, or t
atctcccttcagtatttcatccacgccttgtcctagcaccatgtnnnnnnnnnnnnnnncagagacttttgttgtgatgagagaagcactggatggtgtggtcagtcacctgtctgtccttacagcaccatagacttgtactgggctatgctgcttgaagcagagatggaattaatgaagcacagttggataatcattctttcgtattactcaagaccagcacctgtccctcctccccttggtctaagacattaagaagaaaagatagaatttgtttttatagggtcttttgttgttttgttttcctctggtgcttgagatgagagcaggaccttatgtgtgctaagcacctgctctgcaatgagttgctacccagccatatctagtatgtgactcgcagattgtcactaaagttgcaaaagtcatcat

SEQ ID NO: 5851 - DNA, 432 bp, Cricetulus griseus
  misc_feature (40)..(79): n is a, c, g, or t
  misc_feature (104)..(160): n is a, c, g, or t
  misc_feature (185)..(225): n is a, c, g, or t
  misc_feature (227)..(261): n is a, c, g, or t
  misc_feature (267)..(373): n is a, c, g, or t
tgggccacctgatgatgaggcggccatgggcattaaaagnnnnnnnnnnnnnnnnnnnnnnnnnnnnnnnnnnnnnnnnatggtgccaacctccgacaaaggcnnnnnnnnnnnnnnnnnnnnnnnnnnnnnnnnnnnnnnnnnnnnnnnnnnnnnnnnnccgcatcatgggccccaactacacnnnnnnnnnnnnnnnnnnnnnnnnnnnnnnnnnnnnnnnnngnnnnnnnnnnnnnnnnnnnnnnnnnnnnnnnnnnnttgagnnnnnnnnnnnnnnnnnnnnnnnnnnnnnnnnnnnnnnnnnnnnnnnnnnnnnnnnnnnnnnnnnnnnnnnnnnnnnnnnnnnnnnnnnnnnnnnnnnnnnnnnnnncttcatcgtcagccctgtcgtcatattggctgcggaggccaataacccagctgacctgc

SEQ ID NO: 5852 - DNA, 551 bp, Cricetulus griseus; identical to SEQ ID NO: 2210

SEQ ID NO: 5853 - DNA, 524 bp, Cricetulus griseus; identical to SEQ ID NO: 2211

SEQ ID NO: 5854 - DNA, 416 bp, Cricetulus griseus; identical to SEQ ID NO: 2212

SEQ ID NO: 5855 - DNA, 572 bp, Cricetulus griseus; identical to SEQ ID NO: 2213

SEQ ID NO: 5856 - DNA, 510 bp, Cricetulus griseus; identical to SEQ ID NO: 2214

SEQ ID NO: 5857 - DNA, 579 bp, Cricetulus griseus; identical to SEQ ID NO: 2215
  misc_feature (143)..(182): n is a, c, g, or t

SEQ ID NO: 5858 - DNA, 541 bp, Cricetulus griseus
ctcctccaagataagcagcgcgaaaatctactgcgtggcttgtcaggagctcgactcagatgtggataaagacaatccggctctgaatccacaagcggccctctctcaagctcgggaacaccagctcgcctccacgacagagcctgccacaggctctcgtcccacaccccatcccccagtaccccgtccagagcactgtgagggagctgcagcagggctcaaggcagcccatgggcctcccctacctgctgcacctctaaatacagatgtggtggcttacacacagacagccctcctgcagaagctaacctgggcttcagctgagctgggctctaccacctccttggagactagtattcatctgtgtgggcttatccgggcttgtgctgaggccctgtgcagcctgaagcagcttcagctctgagacctctactccaacctgtgttcccctgagaaaaaccctctagaaaaacagctgttcctctgtgcggcttgttcctttcttggttctgagagcatgcaagcccccgctctatacatg

SEQ ID NO: 5859 - DNA, 581 bp, Cricetulus griseus; identical to SEQ ID NO: 2217

SEQ ID NO: 5860 - DNA, 578 bp, Cricetulus griseus; identical to SEQ ID NO: 2218

SEQ ID NO: 5861 - DNA, 579 bp, Cricetulus griseus; identical to SEQ ID NO: 2219

SEQ ID NO: 5862 - DNA, 578 bp, Cricetulus griseus; identical to SEQ ID NO: 2220
  misc_feature (409)..(409): n is a, c, g, or t

SEQ ID NO: 5863 - DNA, 529 bp, Cricetulus griseus; identical to SEQ ID NO: 2221

SEQ ID NO: 5864 - DNA, 580 bp, Cricetulus griseus; identical to SEQ ID NO: 2222
  misc_feature (264)..(280): n is a, c, g, or t

SEQ ID NO: 5865 - DNA, 579 bp, Cricetulus griseus; identical to SEQ ID NO: 2223
  misc_feature (487)..(487): n is a, c, g, or t

SEQ ID NO: 5866 - DNA, 580 bp, Cricetulus griseus; identical to SEQ ID NO: 2224
  misc_feature (500)..(530): n is a, c, g, or t

SEQ ID NO: 5867 - DNA, 581 bp, Cricetulus griseus; identical to SEQ ID NO: 2225

SEQ ID NO: 5868 - DNA, 568 bp, Cricetulus griseus; identical to SEQ ID NO: 2226
  misc_feature (154)..(189): n is a, c, g, or t
  misc_feature (483)..(483): n is a, c, g, or t

SEQ ID NO: 5869 - DNA, 578 bp, Cricetulus griseus; identical to SEQ ID NO: 2227

SEQ ID NO: 5870 - DNA, 579 bp, Cricetulus griseus; identical to SEQ ID NO: 2228

SEQ ID NO: 5871 - DNA, 567 bp, Cricetulus griseus; identical to SEQ ID NO: 2229

SEQ ID NO: 5872 - DNA, 581 bp, Cricetulus griseus; identical to SEQ ID NO: 2230

SEQ ID NO: 5873 - DNA, 84 bp, Cricetulus griseus; identical to SEQ ID NO: 2231

SEQ ID NO: 5874 - DNA, 579 bp, Cricetulus griseus; identical to SEQ ID NO: 2232

SEQ ID NO: 5875 - DNA, 600 bp, Cricetulus griseus; identical to SEQ ID NO: 2233
  misc_feature (30)..(30): n is a, c, g, or t
  misc_feature (38)..(38): n is a, c, g, or t
  misc_feature (46)..(46): n is a, c, g, or t
  misc_feature (51)..(51): n is a, c, g, or t
  misc_feature (56)..(80): n is a, c, g, or t
  misc_feature (83)..(103): n is a, c, g, or t

SEQ ID NO: 5876 - DNA, 579 bp, Cricetulus griseus; identical to SEQ ID NO: 2234

SEQ ID NO: 5877 - DNA, 503 bp, Cricetulus griseus; identical to SEQ ID NO: 2235
  misc_feature (359)..(378): n is a, c, g, or t

SEQ ID NO: 5878 - DNA, 555 bp, Cricetulus griseus; identical to SEQ ID NO: 2236

SEQ ID NO: 5879 - DNA, 485 bp, Cricetulus griseus; identical to SEQ ID NO: 2237

SEQ ID NO: 5880 - DNA, 246 bp, Cricetulus griseus; identical to SEQ ID NO: 2238

SEQ ID NO: 5881 - DNA, 567 bp, Cricetulus griseus; identical to SEQ ID NO: 2239

SEQ ID NO: 5882 - DNA, 377 bp, Cricetulus griseus; identical to SEQ ID NO: 2240

SEQ ID NO: 5883 - DNA, 395 bp, Cricetulus griseus; identical to SEQ ID NO: 2241

SEQ ID NO: 5884 - DNA, 395 bp, Cricetulus griseus
cattttattgattaataataattgatagggaagggtcgtattctgtgggggaggactttattccccatgggtggggccatccatgggctgatggtcctgggtgctataaaaaagcaggcttagcaagccaggaaacaagtgttcttccacagtgtatgcatcagttcctgcctataggtttctaattccagttcctgccccagtttccttttgttaaagcactgtgatgcagaagtataagacacaatcacccctttcctcctcaaactgcttttggtcatggcatttttgtgcaataaattgtctacaattatataagacaagtatatacacacgcgaagtatacacatatcacacacatgtatacacagtacagacacacaaaagcatacaca

SEQ ID NO: 5885 - DNA, 578 bp, Cricetulus griseus; identical to SEQ ID NO: 2243

SEQ ID NO: 5886 - DNA, 570 bp, Cricetulus griseus; identical to SEQ ID NO: 2244

SEQ ID NO: 5887 - DNA, 579 bp, Cricetulus griseus; identical to SEQ ID NO: 2245
  misc_feature (57)..(100): n is a, c, g, or t
  misc_feature (508)..(522): n is a, c, g, or t
  misc_feature (554)..(554): n is a, c, g, or t

SEQ ID NO: 5888 - DNA, 600 bp, Cricetulus griseus; identical to SEQ ID NO: 2246
  misc_feature (30)..(73): n is a, c, g, or t

SEQ ID NO: 5889 - DNA, 104 bp, Cricetulus griseus
  misc_feature (44)..(68): n is a, c, g, or t
accaagcatgtccttactggctcagctgataacacctgtccgcnnnnnnnnnnnnnnnnnnnnnnnnncactggccctacggaaaaccaactaacccgtccaaa

SEQ ID NO: 5890 - DNA, 483 bp, Cricetulus griseus
tggacgccgagatggagttcaactgcgagatgaacaagagaactgggcaacccatgatccacatctatctggataaggagacaggaaagcctaaaggtgatgcaacagtgtcctatgaagatgcacgaactgccaaggctgctgtggaatggtttgatggaaaagattttcaaggaagcaaacttaaagtttctcttgcccgaaagaagcctccaatgaacagcatgcggggtggcatgccacctcgagagggcagagggatgccaccaccacttcgtggaggtcctggtggcccatgtggtcctggaggacccatgggacgcatgggaggccgtggatgagacagaggaggcttccccccacggggaccccgaggctcccgagggaacccctctggaggaggaaatgtccagcaccgatctggagactggcagtgtcccaatccgggctgcggaaaccagatctccgcctggagaacagaat

SEQ ID NO: 5891 - DNA, 432 bp, Cricetulus griseus; identical to SEQ ID NO: 2249

SEQ ID NO: 5892 - DNA, 449 bp, Cricetulus griseus
aagacgagcagacaagaaaactggccattttggcagagcagtatgaacagagtataaatgagatgatggcttctcaggcgttacggctagacgaggcgcaggaggcagagtgccaggccttgagactacagctgcagcaggagatggagctgctcaacgcctaccagagcaaaatcaagatgcagacagaggcccagcacgagcgcgagctgcagaagctagagcagagggtgtctctgcgcagagcgcatcttgagcagaagattgaagaggagcttgccgccctgcagaaggaacgcagcgagagaatcaagattctcctggaaagacaagagcgagagacggagacttttgacatggagagcctcagaatgggatttgggaatttggtgacattagattttcctaaggaggactatagatgagattaaatttttttgccatttaca

SEQ ID NO: 5893 - DNA, 523 bp, Cricetulus griseus
cccctcgagggtgcgacccacggcgtgccggaaaaaaaaaaagccaggggattcatgtttgggtatgttataaggggagggacttcatcagatgtggacgatttctatctatatccaactctgcaggttggagttagcataaaacttggaaaaatctactggggctttctttcctgactgtgggtcattttctttggggttctcccttttctgatcaccggttctaaacagctttgccacttttgtgtcccaaggcaataaataggaaacaaaactttgtaaaggggaacaagaaaagttacctgttaccctatcaaagtccactgtctcgggtgacactaacgaggacatggggaaggggacactggagtgtgttatcttggggtgctgatgcaggtgcagggtctcaaatatacaaccaggtggtatttctcaaaagttggccacttggttctgaatcctatcctcttaatttctgcaggaaagttaaagttacatggtgttgcattttgttctgggtggg

SEQ ID NO: 5894 - DNA, 545 bp, Cricetulus griseus
  misc_feature (37)..(61): n is a, c, g, or t
  misc_feature (140)..(168): n is a, c, g, or t
  misc_feature (438)..(450): n is a, c, g, or t
  misc_feature (452)..(464): n is a, c, g, or t
  misc_feature (474)..(505): n is a, c, g, or t
taggttaagagcactgcttgttcttccaaaggtcctnnnnnnnnnnnnnnnnnnnnnnnnngtggctcacagccatctggaatgagatctggtgccctcctctggcctgtaggcaacatgcaggcagaacactgtacacnnnnnnnnnnnnnnnnnnnnnnnnnnnnncttaaaaaaataaaataaaaccagctactttttttccaggtgtgatggtatacactcaagtctgctgaggcaggattgttgtaggttctaggtcaagcttcactacagtacccttgtctcacatcccctccttcagtgaaagaaagaaaatacctcttaatcttgttatggaaaagtcagatcttcagcttgcttcatcacttgactataagagatgttttaacttcagaggaataatactccaacaaagctgggcgttggtggcgcatnnnnnnnnnnnnnannnnnnnnnnnnnaaggcatgcnnnnnnnnnnnnnnnnnnnnnnnnnnnnnnnnccagaacgagtgccaagataggctccaaagctatacagag

SEQ ID NO: 5895 - DNA, 532 bp, Cricetulus griseus; identical to SEQ ID NO: 2253

SEQ ID NO: 5896 - DNA, 521 bp, Cricetulus griseus; identical to SEQ ID NO: 2254
  misc_feature (39)..(53): n is a, c, g, or t

SEQ ID NO: 5897 - DNA, 214 bp, Cricetulus griseus; identical to SEQ ID NO: 2255
  misc_feature (157)..(157): n is a, c, g, or t
  misc_feature (172)..(172): n is a, c, g, or t

SEQ ID NO: 5898 - DNA, 386 bp, Cricetulus griseus; identical to SEQ ID NO: 2256

SEQ ID NO: 5899 - DNA, 580 bp, Cricetulus griseus; identical to SEQ ID NO: 2257

SEQ ID NO: 5900 - DNA, 180 bp, Cricetulus griseus
  misc_feature (63)..(78): n is a, c, g, or t
  misc_feature (80)..(94): n is a, c, g, or t
  misc_feature (109)..(128): n is a, c, g, or t
attattttccttattcttattctattgaccttacctgtaataataactgtatttaacttctannnnnnnnnnnnnnnngnnnnnnnnnnnnnnncaacaattgagctgnnnnnnnnnnnnnnnnnnnncgcactatgcactttagtggagggtaacactgaattgctaattactaattgg

SEQ ID NO: 5901 - DNA, 580 bp, Cricetulus griseus; identical to SEQ ID NO: 2259

SEQ ID NO: 5902 - DNA, 581 bp, Cricetulus griseus; identical to SEQ ID NO: 2260

SEQ ID NO: 5903 - DNA, 578 bp, Cricetulus griseus; identical to SEQ ID NO: 2261
  misc_feature (507)..(507): n is a, c, g, or t

SEQ ID NO: 5904 - DNA, 505 bp, Cricetulus griseus; identical to SEQ ID NO: 2262

SEQ ID NO: 5905 - DNA, 568 bp, Cricetulus griseus
agctacctgcggcgcgggagtcctcagctctgggtgcgtggcatccacagccggccggagcagcaccaccagctttcataggaggagcaaggcctctggggctgacggaggtggccctcggctgctgtccattgcgggcactcgaccgtcggtgcggaatggacagctgctggtgtcaaccgggctcccagccctggaccagctcttaagtggaggtttagctgttggaacagttcttctgattgaagaagataaatacagtatttattcacctttgctcttcaagtatttcctggcagaaggaattgtcaatgggcatactctgttggttgcatctgccaaagaaaagcctgccgacattttacaggaactccctgcaccactacttgatgacaatggtaaaaaagagcttgaagatgttcataattctaaaacaccagaatcagatgttaacatgaaaatagcctggcgataccagttgcaacccaagatgcaagttgggccagtgtcatcttcacgatttggtcactattatgatgtatcaaaaaggattcctcaggagctacta

SEQ ID NO: 5906 - DNA, 505 bp, Cricetulus griseus; identical to SEQ ID NO: 2264
  misc_feature (32)..(47): n is a, c, g, or t

SEQ ID NO: 5907 - DNA, 523 bp, Cricetulus griseus; identical to SEQ ID NO: 2265
  misc_feature (139)..(153): n is a, c, g, or t

SEQ ID NO: 5908 - DNA, 579 bp, Cricetulus griseus; identical to SEQ ID NO: 2266

SEQ ID NO: 5909 - DNA, 570 bp, Cricetulus griseus; identical to SEQ ID NO: 2267

SEQ ID NO: 5910 - DNA, 515 bp, Cricetulus griseus; identical to SEQ ID NO: 2268

SEQ ID NO: 5911 - DNA, 436 bp, Cricetulus griseus; identical to SEQ ID NO: 2269
  misc_feature (234)..(290): n is a, c, g, or t

SEQ ID NO: 5912 - DNA, 555 bp, Cricetulus griseus
  misc_feature (145)..(159): n is a, c, g, or t
ttacattttgaaattttaaaacagccaaacttaggtgtcctgctgtcctcagggtcccaagggaagggaccctgggcaggtctagcaccaagtccaccccactattagctttacgtggactcgcaatgggcagcaagcagtagtnnnnnnnnnnnnnnnacctgcctccagcaataaacttctaaatatctatctctacctccatcaaaataactatggtgagaattaagaggaggaggaaatcagccatacaggagatgcccctctgctgagtgtccaaggacaaaaaaaccaggccactagggaaaggtgtccagatggtaggaacagagtcattaagatgggtggcctgatacacagatttcagatcaataatgacacaagggtaggctaatgtaacctacattagaaggtgtgctgttgtactgagtagacagacccactgattccccaaaccgatttggctctttccacttgccagatatcagggtgggttccctgccttccgcagtacgtcatttagtacttttcagttggttgttttaatgcttcttc

SEQ ID NO: 5913 - DNA, 164 bp, Cricetulus griseus
ctggtaatgagccacggcctgtgggaacctttttctctctgtgaactaaaatctttcaattgtcacagggttgttttgctatcctaggtctgtatacataataattaaatctttttttaaaatgaaggaatatacacacactgagtaataacaaaaataaacaa

SEQ ID NO: 5914 - DNA, 179 bp, Cricetulus griseus; identical to SEQ ID NO: 2272

SEQ ID NO: 5915 - DNA, 574 bp, Cricetulus griseus; identical to SEQ ID NO: 2273

SEQ ID NO: 5916 - DNA, 566 bp, Cricetulus griseus; identical to SEQ ID NO: 2274

SEQ ID NO: 5917 - DNA, 455 bp, Cricetulus griseus; identical to SEQ ID NO: 2275

SEQ ID NO: 5918 - DNA, 564 bp, Cricetulus griseus; identical to SEQ ID NO: 2276

SEQ ID NO: 5919 - DNA, 467 bp, Cricetulus griseus; identical to SEQ ID NO: 2277

SEQ ID NO: 5920 - DNA, 121 bp, Cricetulus griseus; identical to SEQ ID NO: 2278

SEQ ID NO: 5921 - DNA, 121 bp, Cricetulus griseus
atgtattcatgcttatgctgcagcccaatcacccagtatccgctctggggctgatacctggagtaggcactctgcttgcctggatactggctgtctccggtttttagataggacaagattt

SEQ ID NO: 5922 - DNA, 567 bp, Cricetulus griseus; identical to SEQ ID NO: 2280

SEQ ID NO: 5923 - DNA, 545 bp, Cricetulus griseus; identical to SEQ ID NO: 2281
  misc_feature (85)..(129): n is a, c, g, or t

SEQ ID NO: 5924 - DNA, 483 bp, Cricetulus griseus; identical to SEQ ID NO: 2282

SEQ ID NO: 5925 - DNA, 441 bp, Cricetulus griseus; identical to SEQ ID NO: 2283

SEQ ID NO: 5926 - DNA, 246 bp, Cricetulus griseus; identical to SEQ ID NO: 2284

SEQ ID NO: 5927 - DNA, 472 bp, Cricetulus griseus; identical to SEQ ID NO: 2285

SEQ ID NO: 5928 - DNA, 92 bp, Cricetulus griseus; identical to SEQ ID NO: 2286

SEQ ID NO: 5929 - DNA, 455 bp, Cricetulus griseus; identical to SEQ ID NO: 2287

SEQ ID NO: 5930 - DNA, 573 bp, Cricetulus griseus; identical to SEQ ID NO: 2288
  misc_feature (217)..(245): n is a, c, g, or t

SEQ ID NO: 5931 - DNA, 432 bp, Cricetulus griseus; identical to SEQ ID NO: 2289
  misc_feature (205)..(219): n is a, c, g, or t

SEQ ID NO: 5932 - DNA, 114 bp, Cricetulus griseus
caaagcttttttgggaaaaacctacctttgggtgcccgggaacttattttgaaaaccaggcgggccttaacctgaaaaattgcccggcctttgccttttaaaggcggaaataaa

SEQ ID NO: 5933 - DNA, 580 bp, Cricetulus griseus; identical to SEQ ID NO: 2291

SEQ ID NO: 5934 - DNA, 397 bp, Cricetulus griseus
accactttgcacctgccattatgtacagtcataactgtaattagtcaaataaacaaaaacagacccaaaagcaaaagttaaaataacaaacaagtcagtatcacccccctcccacggccagccgtctgccggtctgtccatctatctgtcttcttggagaagtgtctctttagaatgttttttgggttgtttattcttttgctgttgctttgagctaaaaagagtcacttctgggcgttcactcctcgtgaggtgtacacattcctccccttttccgaggcgtctctgcctctgtccctcatccctctgttttatggcttggtgtaatcccatgcatctgtgctttttgtcccctgcactgtctaaaacatcctcacacagacagtatcatgttgcg

SEQ ID NO: 5935 - DNA, 530 bp, Cricetulus griseus; identical to SEQ ID NO: 2293

SEQ ID NO: 5936 - DNA, 500 bp, Cricetulus griseus; identical to SEQ ID NO: 2294
  misc_feature (214)..(214): n is a, c, g, or t
  misc_feature (232)..(254): n is a, c, g, or t

SEQ ID NO: 5937 - DNA, 578 bp, Cricetulus griseus; identical to SEQ ID NO: 2295

SEQ ID NO: 5938 - DNA, 541 bp, Cricetulus griseus; identical to SEQ ID NO: 2296

SEQ ID NO: 5939 - DNA, 513 bp, Cricetulus griseus; identical to SEQ ID NO: 2297
  misc_feature (68)..(105): n is a, c, g, or t
  misc_feature (219)..(236): n is a, c, g, or t

SEQ ID NO: 5940 - DNA, 564 bp, Cricetulus griseus; identical to SEQ ID NO: 2298
  misc_feature (458)..(458): n is a, c, g, or t

SEQ ID NO: 5941 - DNA, 496 bp, Cricetulus griseus
aggagaaaagaaatatggggctggaaagagatttactatttatagtaacaacctgcacggtctagcacaaaaacagacccacagaccaatgatataaatccgcacaggtacaattacccaatttttgacaaatatatcaaaaatataaattggaaaaaaagctataccaaataatggttggaaaactagctgagattttgtagaagaatggaacagatcagactcttttaccctacacaaaaataaattcaaaatggctcaaagtcctgtaacgtcaaaattgacagaataaaatatgggtaagggccagtaatatggctcagtggaaaaagggcacctgttaataagcccggagacttaagattgatccctggaattcaggtatggaaagggagaagtgattcccactagttgtgtttagatctctacatgagtgctatgacacatatgaccacacacccaccaaatagtatacttaaaaaaaaaaaaattctca

SEQ ID NO: 5942 - DNA, 555 bp, Cricetulus griseus; identical to SEQ ID NO: 2300

SEQ ID NO: 5943 - DNA, 342 bp, Cricetulus griseus; identical to SEQ ID NO: 2301

SEQ ID NO: 5944 - DNA, 483 bp, Cricetulus griseus; identical to SEQ ID NO: 2302

SEQ ID NO: 5945 - DNA, 483 bp, Cricetulus griseus
gccaggctagttggtcagcagaccccagggaaccacctgcatggccccagaactacaattacagtgtgcagcaccataccaggcttcttaaagagggtgttagaataatacacaggtctttacgcatgcaaagcaggtactttacccactaaaacatctcctcatgatcccagtgcctcaccaactctctctctgtaatgatttatggctgttttgccttaatgtgtgtgtctaccatatgcaccacgtgtgagcctgatgcctgctggaggtcaaaagagggcatcatatcctttggcagtggagtcacagatagctgtgagccaccatgtgggtgctgggaactgaacttgagtcatctgcagagcagcaagtgctcttaactgctgaaccatctctctggccccagaaaagccgtttcaaagatgggatgcttaagcagatccttgaagaatgagtatggatcaatcaaagagtgtaggt

SEQ ID NO: 5946 - DNA, 553 bp, Cricetulus griseus; identical to SEQ ID NO: 2304

SEQ ID NO: 5947 - DNA, 523 bp, Cricetulus griseus; identical to SEQ ID NO: 2305
  misc_feature (421)..(442): n is a, c, g, or t

SEQ ID NO: 5948 - DNA, 536 bp, Cricetulus griseus; identical to SEQ ID NO: 2306
  misc_feature (152)..(168): n is a, c, g, or t

SEQ ID NO: 5949 - DNA, 498 bp, Cricetulus griseus; identical to SEQ ID NO: 2307

SEQ ID NO: 5950 - DNA, 578 bp, Cricetulus griseus; identical to SEQ ID NO: 2308

SEQ ID NO: 5951 - DNA, 580 bp, Cricetulus griseus; identical to SEQ ID NO: 2309
  misc_feature (84)..(103): n is a, c, g, or t

SEQ ID NO: 5952 - DNA, 553 bp, Cricetulus griseus; identical to SEQ ID NO: 2310

SEQ ID NO: 5953 - DNA, 333 bp, Cricetulus griseus; identical to SEQ ID NO: 2311

SEQ ID NO: 5954 - DNA, 544 bp, Cricetulus griseus; identical to SEQ ID NO: 2312

SEQ ID NO: 5955 - DNA, 600 bp, Cricetulus griseus; identical to SEQ ID NO: 2313

SEQ ID NO: 5956 - DNA, 538 bp, Cricetulus griseus; identical to SEQ ID NO: 2314

SEQ ID NO: 5957 - DNA, 536 bp, Cricetulus griseus; identical to SEQ ID NO: 2315

SEQ ID NO: 5958 - DNA, 514 bp, Cricetulus griseus; identical to SEQ ID NO: 2316
  misc_feature (110)..(132): n is a, c, g, or t

SEQ ID NO: 5959 - DNA, 426 bp, Cricetulus griseus; identical to SEQ ID NO: 2317
  misc_feature (342)..(366): n is a, c, g, or t

SEQ ID NO: 5960 - DNA, 116 bp, Cricetulus griseus
atatttgcacacttcttacgtactgacaaagaatgtgataaaaatagcaaacacttggtaatgaccacatgctaggcacttccttagtgttttaatccttaaagctacttgtacca

SEQ ID NO: 5961 - DNA, 403 bp, Cricetulus griseus; identical to SEQ ID NO: 2319

SEQ ID NO: 5962 - DNA, 412 bp, Cricetulus griseus
gtaatgcccgggaaactcctctggggggacatcatggagctcgaggcacccttggaagagtccgagagccagaagaaggagaggcaaaaggtgcgctgcggctgggccgcgcctccctcgggctgcgctggcctgggcggggaggggagcggtccctgaaggggacgacctgtcagtaccgggcgcgagcttcccagggaaggcttcccctcgccttgctcggccctctgaggtcccggagaccgtccccgtcgccactctcccggacctggaggaggacggaccaaggcttgagcccggcatccgtggcacttcagcccgacgtcggcctctgcgcctggatccctcccaagagatgggcagactcgagctcccgtcgccgcggaatctgctcgttctccctttgctcggc

SEQ ID NO: 5963 - DNA, 372 bp, Cricetulus griseus; identical to SEQ ID NO: 2321

SEQ ID NO: 5964 - DNA, 569 bp, Cricetulus griseus; identical to SEQ ID NO: 2322
  misc_feature (523)..(537): n is a, c, g, or t

SEQ ID NO: 5965 - DNA, 515 bp, Cricetulus griseus; identical to SEQ ID NO: 2323

SEQ ID NO: 5966 - DNA, 542 bp, Cricetulus griseus; identical to SEQ ID NO: 2324

SEQ ID NO: 5967 - DNA, 579 bp, Cricetulus griseus; identical to SEQ ID NO: 2325

SEQ ID NO: 5968 - DNA, 503 bp, Cricetulus griseus; identical to SEQ ID NO: 2326
  misc_feature (49)..(67): n is a, c, g, or t

SEQ ID NO: 5969 - DNA, 497 bp, Cricetulus griseus; identical to SEQ ID NO: 2327

SEQ ID NO: 5970 - DNA, 252 bp, Cricetulus griseus; identical to SEQ ID NO: 2328

SEQ ID NO: 5971 - DNA, 553 bp, Cricetulus griseus; identical to SEQ ID NO: 2329

SEQ ID NO: 5972 - DNA, 580 bp, Cricetulus griseus; identical to SEQ ID NO: 2330
  misc_feature (459)..(478): n is a, c, g, or t

SEQ ID NO: 5973 - DNA, 537 bp, Cricetulus griseus; identical to SEQ ID NO: 2331
  misc_feature (181)..(197): n is a, c, g, or t

SEQ ID NO: 5974 - DNA, 78 bp, Cricetulus griseus; identical to SEQ ID NO: 2332

SEQ ID NO: 5975 - DNA, 557 bp, Cricetulus griseus; identical to SEQ ID NO: 2333

SEQ ID NO: 5976 - DNA, 546 bp, Cricetulus griseus; identical to SEQ ID NO: 2334
  misc_feature (407)..(425): n is a, c, g, or t

SEQ ID NO: 5977 - DNA, 84 bp, Cricetulus griseus
tttcatttcactgttggtgaaagcaagaaggcatctgccaaagtttcagatgggatttctactcagtacccagttgtggatcat

SEQ ID NO: 5978 - DNA, 580 bp, Cricetulus griseus; identical to SEQ ID NO: 2336

SEQ ID NO: 5979 - DNA, 133 bp, Cricetulus griseus
atggacatggatctcctcattgatctgaacaaagcaaatgaagaagagttggaacgctaggatgaagacctggatgatgcacagaagaatccgggaaagagtgaaattcaaaatgcaatgatggcaaaagcgg

SEQ ID NO: 5980 - DNA, 231 bp, Cricetulus griseus; identical to SEQ ID NO: 2338

SEQ ID NO: 5981 - DNA, 544 bp, Cricetulus griseus; identical to SEQ ID NO: 2339

SEQ ID NO: 5982 - DNA, 434 bp, Cricetulus griseus; identical to SEQ ID NO: 2340
  misc_feature (38)..(60): n is a, c, g, or t

SEQ ID NO: 5983 - DNA, 512 bp, Cricetulus griseus; identical to SEQ ID NO: 2341

SEQ ID NO: 5984 - DNA, 513 bp, Cricetulus griseus; identical to SEQ ID NO: 2342

SEQ ID NO: 5985 - DNA, 544 bp, Cricetulus griseus; identical to SEQ ID NO: 2343

SEQ ID NO: 5986 - DNA, 255 bp, Cricetulus griseus
  misc_feature (232)..(253): n is a, c, g, or t
caaggcctttttgggtgatccatttgcatttgggggtgctggtcctgggggtgctgccccccctggtggtcctggtgccgctgcagccccagggaagggtgaaaccaaggaaaagtcggaggaatcaaatgaggatatgggatttggtttgtttgactgatccctcagagcaacctaatcagccagttttattttagaaatatggaaataaagaataaagtttttcttttgnnnnnnnnnnnnnnnnnnnnnngg

SEQ ID NO: 5987 - DNA, 385 bp, Cricetulus griseus; identical to SEQ ID NO: 2345

SEQ ID NO: 5988 - DNA, 497 bp, Cricetulus griseus; identical to SEQ ID NO: 2346

SEQ ID NO: 5989 - DNA, 454 bp, Cricetulus griseus; identical to SEQ ID NO: 2347

SEQ ID NO: 5990 - DNA, 514 bp, Cricetulus griseus
gatccctttactgttcatatggcagcaagaattattgccaagttagcagcttgggggaaagaattgatggaaggcagtgacttaaattactattttaattggattaaaactcagctgagttcacagaaacttcgtggtagcggtgttgctgttgaaacaggaacaatctcttcaagtgatagttctcagtatgtgcagtgtgttgctggctgtctgcaactgatgctccgggtcaatgagtaccgttttgcctgggtggaagcagatggggtgaactgtataatgggcgttttgagtaacaagtgtggctttcaactccaatatcaaatgattttttcaatatggctcctggcatttagtcctcaaatgtgtgaacaccttcgccgctacaatatcattcctgttctctcagacatccttcaagaatctgtcaaagaaaaagtaacaagaatcattcttgcagcattccgtaatttcctagaaaaatcaactgaaagagaaactcgccaagaat

SEQ ID NO: 5991 - DNA, 579 bp, Cricetulus griseus; identical to SEQ ID NO: 2349
  misc_feature (181)..(195): n is a, c, g, or t

SEQ ID NO: 5992 - DNA, 528 bp, Cricetulus griseus; identical to SEQ ID NO: 2350

SEQ ID NO: 5993 - DNA, 496 bp, Cricetulus griseus; identical to SEQ ID NO: 2351

SEQ ID NO: 5994 - DNA, 536 bp, Cricetulus griseus; identical to SEQ ID NO: 2352

SEQ ID NO: 5995 - DNA, 560 bp, Cricetulus griseus; identical to SEQ ID NO: 2353
  misc_feature (291)..(308): n is a, c, g, or t

SEQ ID NO: 5996 - DNA, 396 bp, Cricetulus griseus; identical to SEQ ID NO: 2354

SEQ ID NO: 5997 - DNA, 485 bp, Cricetulus griseus; identical to SEQ ID NO: 2355

SEQ ID NO: 5998 - DNA, 579 bp, Cricetulus griseus; identical to SEQ ID NO: 2356

SEQ ID NO: 5999 - DNA, 520 bp, Cricetulus griseus; identical to SEQ ID NO: 2357
  misc_feature (180)..(207): n is a, c, g, or t

SEQ ID NO: 6000 - DNA, 423 bp, Cricetulus griseus; identical to SEQ ID NO: 2358

SEQ ID NO: 6001 - DNA, 438 bp, Cricetulus griseus; identical to SEQ ID NO: 2359

SEQ ID NO: 6002 - DNA, 195 bp, Cricetulus griseus; identical to SEQ ID NO: 2360

SEQ ID NO: 6003 - DNA, 164 bp, Cricetulus griseus; identical to SEQ ID NO: 2361

SEQ ID NO: 6004 - DNA, 551 bp, Cricetulus griseus; identical to SEQ ID NO: 2362

SEQ ID NO: 6005 - DNA, 557 bp, Cricetulus griseus; identical to SEQ ID NO: 2363

SEQ ID NO: 6006 - DNA, 590 bp, Cricetulus griseus; identical to SEQ ID NO: 2364

SEQ ID NO: 6007 - DNA, 431 bp, Cricetulus griseus; identical to SEQ ID NO: 2365

SEQ ID NO: 6008 - DNA, 494 bp, Cricetulus griseus; identical to SEQ ID NO: 2366

SEQ ID NO: 6009 - DNA, 389 bp, Cricetulus griseus; identical to SEQ ID NO: 2367

SEQ ID NO: 6010 - DNA, 479 bp, Cricetulus griseus; identical to SEQ ID NO: 2368
  misc_feature (406)..(406): n is a, c, g, or t

SEQ ID NO: 6011 - DNA, 561 bp, Cricetulus griseus; identical to SEQ ID NO: 2369
  misc_feature (32)..(73): n is a, c, g, or t

SEQ ID NO: 6012 - DNA, 535 bp, Cricetulus griseus; identical to SEQ ID NO: 2370

SEQ ID NO: 6013 - DNA, 474 bp, Cricetulus griseus; identical to SEQ ID NO: 2371

SEQ ID NO: 6014 - DNA, 581 bp, Cricetulus griseus; identical to SEQ ID NO: 2372
  misc_feature (421)..(421): n is a, c, g, or t
  misc_feature (515)..(515): n is a, c, g, or t

SEQ ID NO: 6015 - DNA, 525 bp, Cricetulus griseus; identical to SEQ ID NO: 2373

SEQ ID NO: 6016 - DNA, 392 bp, Cricetulus griseus; identical to SEQ ID NO: 2374

SEQ ID NO: 6017 - DNA, 230 bp, Cricetulus griseus; identical to SEQ ID NO: 2375

SEQ ID NO: 6018 - DNA, 566 bp, Cricetulus griseus; identical to SEQ ID NO: 2376

SEQ ID NO: 6019 - DNA, 487 bp, Cricetulus griseus; identical to SEQ ID NO: 2377
  misc_feature (218)..(218): n is a, c, g, or t

SEQ ID NO: 6020 - DNA, 503 bp, Cricetulus griseus; identical to SEQ ID NO: 2378
  misc_feature (347)..(347): n is a, c, g, or t

SEQ ID NO: 6021 - DNA, 564 bp, Cricetulus griseus; identical to SEQ ID NO: 2379

SEQ ID NO: 6022 - DNA, 146 bp, Cricetulus griseus; identical to SEQ ID NO: 2380
  misc_feature (90)..(90): n is a, c, g, or t

SEQ ID NO: 6023 - DNA, 484 bp, Cricetulus griseus; identical to SEQ ID NO: 2381
  misc_feature (362)..(390): n is a, c, g, or t

SEQ ID NO: 6024 - DNA, 260 bp, Cricetulus griseus; identical to SEQ ID NO: 2382

SEQ ID NO: 6025 - DNA, 419 bp, Cricetulus griseus; identical to SEQ ID NO: 2383

SEQ ID NO: 6026 - DNA, 431 bp, Cricetulus griseus; identical to SEQ ID NO: 2384

SEQ ID NO: 6027 - DNA, 579 bp, Cricetulus griseus; identical to SEQ ID NO: 2385

SEQ ID NO: 6028 - DNA, 479 bp, Cricetulus griseus; identical to SEQ ID NO: 2386
  misc_feature (296)..(310): n is a, c, g, or t

SEQ ID NO: 6029 - DNA, 114 bp, Cricetulus griseus; identical to SEQ ID NO: 2387

SEQ ID NO: 6030 - DNA, 356 bp, Cricetulus griseus; identical to SEQ ID NO: 2388

SEQ ID NO: 6031 - DNA, 490 bp, Cricetulus griseus; identical to SEQ ID NO: 2389
  misc_feature (58)..(75): n is a, c, g, or t

SEQ ID NO: 6032 - DNA, 490 bp, Cricetulus griseus
  misc_feature (416)..(433): n is a, c, g, or t
catttcttttttatcatgtggtaggacatgttgtctgaatgtatgtacatgtttgtttggtatctaccaatgacagaagagggtgtaactaggattactgacagttgggagataccatgtggattcagcgaatcaaacccaggtcttctggaagactagccagtgctgttaactgcagagacatcccaactcctctttgttggtggtggtgatgatcactttggttttggttttggtttctatttttgtttttattttctgagacagggtttctctgtgtagccctagctgtcctggaactcatgagatagaccatgctggcctcaaactcagagatcctctcgcctctgccttttaagtgcttgaactaaaggcacagctgacatgccaaatcttaaggcatgctgaatctttcnnnnnnnnnnnnnnnnnncctgaagtttagtgatctacatgatcagtatggaaggtgtcataaaagaatacattt

SEQ ID NO: 6033 - DNA, 435 bp, Cricetulus griseus
tataggctatcttcctcactcaccctccacttcagttgttcaaactgagtctcttactgaacccaaagctcatccacttggctagactagctggccatcaagtccctaggattcctgtctcagtctcccagcactggattacaggcttttcacatggtactcagttccttatgcttcacaacaatcattttaccaatagccatctgcccagcttccagctccattactggaagaaacttaaagcatagaattctgggtccctgcataaaaattaaaactatctactccaagtcagacatgtggccctgtgtctataatctcaactactcagcagtctaaagcaagaagatggagggaacatttgaggccagccgagagctacatacacacacaggctctacctccaaaataaataaataaataagactgctctag

SEQ ID NO: 6034 - DNA, 513 bp, Cricetulus griseus; identical to SEQ ID NO: 2392

SEQ ID NO: 6035 - DNA, 531 bp, Cricetulus griseus; identical to SEQ ID NO: 2393

SEQ ID NO: 6036 - DNA, 436 bp, Cricetulus griseus; identical to SEQ ID NO: 2394

SEQ ID NO: 6037 - DNA, 509 bp, Cricetulus griseus; identical to SEQ ID NO: 2395

SEQ ID NO: 6038 - DNA, 352 bp, Cricetulus griseus; identical to SEQ ID NO: 2396

SEQ ID NO: 6039 - DNA, 546 bp, Cricetulus griseus; identical to SEQ ID NO: 2397
  misc_feature (219)..(233): n is a, c, g, or t

SEQ ID NO: 6040 - DNA, 372 bp, Cricetulus griseus; identical to SEQ ID NO: 2398

SEQ ID NO: 6041 - DNA, 353 bp, Cricetulus griseus; identical to SEQ ID NO: 2399
  misc_feature (31)..(48): n is a, c, g, or t
  misc_feature (187)..(209): n is a, c, g, or t

SEQ ID NO: 6042 - DNA, 579 bp, Cricetulus griseus; identical to SEQ ID NO: 2400

SEQ ID NO: 6043 - DNA, 395 bp, Cricetulus griseus; identical to SEQ ID NO: 2401

SEQ ID NO: 6044 - DNA, 507 bp, Cricetulus griseus; identical to SEQ ID NO: 2402

SEQ ID NO: 6045 - DNA, 550 bp, Cricetulus griseus; identical to SEQ ID NO: 2403
  misc_feature (54)..(72): n is a, c, g, or t

SEQ ID NO: 6046 - DNA, 510 bp, Cricetulus griseus; identical to SEQ ID NO: 2404
  misc_feature (40)..(58): n is a, c, g, or t
  misc_feature (92)..(109): n is a, c, g, or t

SEQ ID NO: 6047 - DNA, 461 bp, Cricetulus griseus; identical to SEQ ID NO: 2405

SEQ ID NO: 6048 - DNA, 411 bp, Cricetulus griseus
tgtgctaaaaaaaaaactactgaaagaaatgagggcaaaataatcggaaggaattttatgttcatggactagaaaaataatatagtaaaaatgtctttatcacccaaagctacacactaatcctatccaaataccagcgatgcggatggagacagggctcagtggttaggaggacttttgctcttgtagaggacccaggttcaattccaagcactgaatggtggctcacaaccatttgtaactctagttccaaggggtctgatgccttctgccctctgaggatgctagacacacgtcgtacacatataggcagaatactcacataaatacatctgaaaaccattaaaaccataaatgattttctttacagataaagaaaaatagtcataaaactcatagggaacctcaacc

SEQ ID NO: 6049 - DNA, 429 bp, Cricetulus griseus; identical to SEQ ID NO: 2407

SEQ ID NO: 6050 - DNA, 359 bp, Cricetulus griseus; identical to SEQ ID NO: 2408

SEQ ID NO: 6051 - DNA, 445 bp, Cricetulus griseus; identical to SEQ ID NO: 2409

SEQ ID NO: 6052 - DNA, 527 bp, Cricetulus griseus; identical to SEQ ID NO: 2410

SEQ ID NO: 6053 - DNA, 80 bp, Cricetulus griseus; identical to SEQ ID NO: 2411

SEQ ID NO: 6054 - DNA, 531 bp, Cricetulus griseus; identical to SEQ ID NO: 2412
  misc_feature (316)..(316): n is a, c, g, or t

SEQ ID NO: 6055 - DNA, 215 bp, Cricetulus griseus
tttctgcctcagcccaggctctgtcctttgtgttcaccagattcctggagaggcctggctttcctgctgacctgacacatgtacctagggcacacatgctcattggtactgagggactgtggtgagctgcattcctaggggtaggtggcagggaaaggctggcttcagcggtagcaggtaccatttcctggcctgacaacatctgaggcctgaca

SEQ ID NO: 6056 - DNA, 523 bp, Cricetulus griseus; identical to SEQ ID NO: 2414
  misc_feature (370)..(389): n is a, c, g, or t

SEQ ID NO: 6057 - DNA, 532 bp, Cricetulus griseus; identical to SEQ ID NO: 2415

SEQ ID NO: 6058 - DNA, 480 bp, Cricetulus griseus; identical to SEQ ID NO: 2416
  misc_feature (269)..(294): n is a, c, g, or t

SEQ ID NO: 6059 - DNA, 579 bp, Cricetulus griseus; identical to SEQ ID NO: 2417
  misc_feature (178)..(178): n is a, c, g, or t

SEQ ID NO: 6060 - DNA, 379 bp, Cricetulus griseus
gagtaggagggccgctgcggtgagccttgaagcttagggcgcgggcccgggtggagccgccgcaggtgcagatcttggtggtagtagcaaatattcaaacgagaactttgaaggccgaagtggagaagggttccatgtgaacagcagttgaacatgggtcagtcggtcctgagagatgggcgagcgccgttccgaagggacgggcgatggcctccgttgccctcggccgatcgaaagggagtcgggttcagatccccgaatccggagtggcggagatgggcgccgtgaggcgtccagtgcggtaacgcgaccgatcccggagaagccggcgggagccccggggagagttctcttttctttgtaaggaacagggcagtcc

SEQ ID NO: 6061 - DNA, 405 bp, Cricetulus griseus; identical to SEQ ID NO: 2419

SEQ ID NO: 6062 - DNA, 378 bp, Cricetulus griseus; identical to SEQ ID NO: 2420

SEQ ID NO: 6063 - DNA, 578 bp, Cricetulus griseus; identical to SEQ ID NO: 2421

SEQ ID NO: 6064 - DNA, 540 bp, Cricetulus griseus; identical to SEQ ID NO: 2422

SEQ ID NO: 6065 - DNA, 566 bp, Cricetulus griseus; identical to SEQ ID NO: 2423

SEQ ID NO: 6066 - DNA, 479 bp, Cricetulus griseus; identical to SEQ ID NO: 2424
  misc_feature (257)..(276): n is a, c, g, or t

SEQ ID NO: 6067 - DNA, 558 bp, Cricetulus griseus
aaagtggcccagacggacggtgccaatgtggacatgcacctgaagcagattgaaatcaagaagttcaagtacgggattgaagagcacggcaaggtgaagatgagggggggcctgctgagaacctacatcatcagtatcctctttaagtctgtcttcgaggtggccttcctactcattcagtggtacatctacggcttcagcctgagtgccgtctacacctgcaaaagagatccctgcccccatcaggtggactgcttcctctcgcggcccacagagaaaaccatcttcatcatcttcatgttggtggtgtccttggtgtctctcgctttgaacatcattgagctcttctatgtcttcttcaagggcgttaaggatcgcgtgaagggaaggagcgatccttaccacgccaccaccggcccactgagcccctcaaaagactgtggctctccaaaatatgcctacttcaatggctgctcgtcaccaacagctcccctctcgcctatgtctcctcccgggtacaagctggttaccggtgacagaaacaattcctcctgccgc

SEQ ID NO: 6068 - DNA, 484 bp, Cricetulus griseus; identical to SEQ ID NO: 2426

SEQ ID NO: 6069 - DNA, 147 bp, Cricetulus griseus; identical to SEQ ID NO: 2427

SEQ ID NO: 6070 - DNA, 147 bp, Cricetulus griseus
acagcccacaggttgggaaccactaaattatacattccttccttcaaaggaataaccctgtgtgtttagctttccaggctccccttgtgcttttactgtgagtaccaaggcctttgtgcctcctacatagcctaatataaccatatg

SEQ ID NO: 6071 - DNA, 283 bp, Cricetulus griseus; identical to SEQ ID NO: 2429

SEQ ID NO: 6072 - DNA, 120 bp, Cricetulus griseus; identical to SEQ ID NO: 2430

SEQ ID NO: 6073 - DNA, 541 bp, Cricetulus griseus
  misc_feature (371)..(371): n is a, c, g, or t
gatcatcctaaaggcaactccgttccccaaggatgggtccttcccccgatccccagcaacgacatctgggcaacagccgttaagcttcattaagaccctccaggagtgtggtccagcaggccagcactgcagctctagatgtcagtgatgctgccgtctcacgctgtagtcttctgcacaacttaaacttcatgcggcattgctgtagctggaagtcctgcttctctctattctctgccctggccagagttacctcttgaatcaagaggttgataaagttcttctggaaagggcctagatgaactgaagttattagcatgggcagtggccttcactcactaactgcctctgttttgagaggcttggcctantgtggcctacttatctgttctaagcttgttttgaattggcgggtaaatacagtcagcacacttggttactccttgaagatgttcacggagtagagttagcaggcactactccttattttcctctaccaactgccctccagcttccaggtcaaagtttgacctacagttct

SEQ ID NO: 6074 - DNA, 576 bp, Cricetulus griseus; identical to SEQ ID NO: 2432

SEQ ID NO: 6075 - DNA, 522 bp, Cricetulus griseus; identical to SEQ ID NO: 2433

SEQ ID NO: 6076 - DNA, 211 bp, Cricetulus griseus; identical to SEQ ID NO: 2434

SEQ ID NO: 6077 - DNA, 250 bp, Cricetulus griseus; identical to SEQ ID NO: 2435

SEQ ID NO: 6078 - DNA, 578 bp, Cricetulus griseus; identical to SEQ ID NO: 2436

SEQ ID NO: 6079 - DNA, 580 bp, Cricetulus griseus; identical to SEQ ID NO: 2437
  misc_feature (525)..(525): n is a, c, g, or t
  misc_feature (552)..(552): n is a, c, g, or t

SEQ ID NO: 6080 - DNA, 438 bp, Cricetulus griseus; identical to SEQ ID NO: 2438

SEQ ID NO: 6081 - DNA, 380 bp, Cricetulus griseus; identical to SEQ ID NO: 2439

SEQ ID NO: 6082 - DNA, 177 bp, Cricetulus griseus; identical to SEQ ID NO: 2440

SEQ ID NO: 6083 - DNA, 151 bp, Cricetulus griseus; identical to SEQ ID NO: 2441

SEQ ID NO: 6084 - DNA, 523 bp, Cricetulus griseus; identical to SEQ ID NO: 2442

SEQ ID NO: 6085 - DNA, 514 bp, Cricetulus griseus; identical to SEQ ID NO: 2443

SEQ ID NO: 6086 - DNA, 398 bp, Cricetulus griseus; identical to SEQ ID NO: 2444

SEQ ID NO: 6087 - DNA, 293 bp, Cricetulus griseus
tgcactttgagtctcctggaattcctggggactacctcatcactgccccctgcccttgcttctataagctaactcatgcaagaatacagtgttgaatattcaatgcccagagtctcaaaagttgcctggctttctctgtttaccagagtgggcagtgggacagaagaagttttgagttcctcatctataaatggatagtaagactgcccaatttctacggagtcagtttttatcctgtgaaaaattggaaggctgtgtggaacgcattgcatccctgctatggactaatttgc

SEQ ID NO: 6088 - DNA, 329 bp, Cricetulus griseus; identical to SEQ ID NO: 2446
  misc_feature (116)..(137): n is a, c, g, or t

SEQ ID NO: 6089 - DNA, 418 bp, Cricetulus griseus; identical to SEQ ID NO: 2447

SEQ ID NO: 6090 - DNA, 569 bp, Cricetulus griseus; identical to SEQ ID NO: 2448

SEQ ID NO: 6091 - DNA, 563 bp, Cricetulus griseus; identical to SEQ ID NO: 2449

SEQ ID NO: 6092 - DNA, 454 bp, Cricetulus griseus; identical to SEQ ID NO: 2450

SEQ ID NO: 6093 - DNA, 233 bp, Cricetulus griseus; identical to SEQ ID NO: 2451
  misc_feature (126)..(141): n is a, c, g, or t
  misc_feature (143)..(159): n is a, c, g, or t

SEQ ID NO: 6094 - DNA, 554 bp, Cricetulus griseus; identical to SEQ ID NO: 2452

SEQ ID NO: 6095 - DNA, 153 bp, Cricetulus griseus; identical to SEQ ID NO: 2453

SEQ ID NO: 6096 - DNA, 105 bp, Cricetulus griseus; identical to SEQ ID NO: 2454

SEQ ID NO: 6097 - DNA, 509 bp, Cricetulus griseus; identical to SEQ ID NO: 2455
  misc_feature (192)..(251): n is a, c, g, or t
  misc_feature (479)..(479): n is a, c, g, or t

SEQ ID NO: 6098 - DNA, 463 bp, Cricetulus griseus; identical to SEQ ID NO: 2456

SEQ ID NO: 6099 - DNA, 501 bp, Cricetulus griseus; identical to SEQ ID NO: 2457

SEQ ID NO: 6100 - DNA, 450 bp, Cricetulus griseus; identical to SEQ ID NO: 2458

SEQ ID NO: 6101 - DNA, 561 bp, Cricetulus griseus
gcgatgctgatctttttgattcccatgacgacagagatgacgatggggaggcagggtcggtggaggagcacaagagtgttatcatgcacctcttatcacaagttaggctcggaatggatcttacaaaggtagttcttccgacgtttattcttgagagaagatctcttttagaaatgtatgcagacttcttcgcacatccggacctgtttgtgagcattagcgaccagaaggatcccagggatcgaatggttcaggttgtgaaatggtatctctcagccttccatgcaggaaggagaggatcagtagccaaaaagccgtacaatcctattttgggtgagatctttcagtgtcactggacattgccaaatgatactgaagagaacacagaacttgtttcagaaggaccggttccgtgggtttctaagaacagtgtaacatttgtggctgagcaagtttcccatcatccacccatttcagccttttacgctgagtgttttaacaagaagatacaattcaatgctcatatctggactaaatcaaaattccttgggatgtctattg

SEQ ID NO: 6102 - DNA, 90 bp, Cricetulus griseus
cctttgtgtgttagtgtgtatgagctgtgaatgtgatactccgacactaagactccagacacaaatgtagaaacacttgaactgctcgtg

SEQ ID NO: 6103 - DNA, 430 bp, Cricetulus griseus; identical to SEQ ID NO: 2461
  misc_feature (131)..(174): n is a, c, g, or t
  misc_feature (238)..(273): n is a, c, g, or t

SEQ ID NO: 6104 - DNA, 296 bp, Cricetulus griseus; identical to SEQ ID NO: 2462

SEQ ID NO: 6105 - DNA, 578 bp, Cricetulus griseus; identical to SEQ ID NO: 2463
  misc_feature (102)..(102): n is a, c, g, or t
  misc_feature (387)..(403): n is a, c, g, or t
  misc_feature (497)..(512): n is a, c, g, or t

SEQ ID NO: 6106 - DNA, 428 bp, Cricetulus griseus; identical to SEQ ID NO: 2464

SEQ ID NO: 6107 - DNA, 490 bp, Cricetulus griseus; identical to SEQ ID NO: 2465

SEQ ID NO: 6108 - DNA, 494 bp, Cricetulus griseus; identical to SEQ ID NO: 2466

SEQ ID NO: 6109 - DNA, 146 bp, Cricetulus griseus
gtgagcgataaggaacactcccggcagatcaatgacatccagctatctagagacatgaccatgtttgtcaccgcgtccaaggacaacacagataagctctttgactccacgagtcttgaacatcagaagactttccgaacagaacg

SEQ ID NO: 6110 - DNA, 119 bp, Cricetulus griseus; identical to SEQ ID NO: 2468

SEQ ID NO: 6111 - DNA, 538 bp, Cricetulus griseus; identical to SEQ ID NO: 2469

SEQ ID NO: 6112 - DNA, 490 bp, Cricetulus griseus; identical to SEQ ID NO: 2470

SEQ ID NO: 6113 - DNA, 146 bp, Cricetulus griseus; identical to SEQ ID NO: 2471

SEQ ID NO: 6114 - DNA, 146 bp, Cricetulus griseus
tgtttacactatattcccttcatttcaaagggtcaccaatgatattggcactcccccccccgacagtgtcttcacactgggacccagagacctgagcgcccgggggctccacacacagatgtgcccactgtgtataacacagagtg

SEQ ID NO: 6115 - DNA, 577 bp, Cricetulus griseus; identical to SEQ ID NO: 2473
  misc_feature (522)..(522): n is a, c, g, or t

SEQ ID NO: 6116 - DNA, 432 bp, Cricetulus griseus; identical to SEQ ID NO: 2474

SEQ ID NO: 6117 - DNA, 312 bp, Cricetulus griseus; identical to SEQ ID NO: 2475

SEQ ID NO: 6118 - DNA, 579 bp, Cricetulus griseus; identical to SEQ ID NO: 2476

SEQ ID NO: 6119 - DNA, 537 bp, Cricetulus griseus; identical to SEQ ID NO: 2477
  misc_feature (144)..(163): n is a, c, g, or t

SEQ ID NO: 6120 - DNA, 564 bp, Cricetulus griseus; identical to SEQ ID NO: 2478

SEQ ID NO: 6121 - DNA, 360 bp, Cricetulus griseus; identical to SEQ ID NO: 2479

SEQ ID NO: 6122 - DNA, 587 bp, Cricetulus griseus; identical to SEQ ID NO: 2480
  misc_feature (514)..(514): n is a, c, g, or t

SEQ ID NO: 6123 - DNA, 580 bp, Cricetulus griseus; identical to SEQ ID NO: 2481

SEQ ID NO: 6124 - DNA, 508 bp, Cricetulus griseus; identical to SEQ ID NO: 2482

SEQ ID NO: 6125 - DNA, 535 bp, Cricetulus griseus; identical to SEQ ID NO: 2483
  misc_feature (74)..(146): n is a, c, g, or t

SEQ ID NO: 6126 - DNA, 568 bp, Cricetulus griseus; identical to SEQ ID NO: 2484
  misc_feature (368)..(386): n is a, c, g, or t
  misc_feature (524)..(524): n is a, c, g, or t

SEQ ID NO: 6127 - DNA, 334 bp, Cricetulus griseus; identical to SEQ ID NO: 2485

SEQ ID NO: 6128 - DNA, 557 bp, Cricetulus griseus; identical to SEQ ID NO: 2486

SEQ ID NO: 6129 - DNA, 579 bp, Cricetulus griseus; identical to SEQ ID NO: 2487
  misc_feature (550)..(550): n is a, c, g, or t

SEQ ID NO: 6130 - DNA, 507 bp, Cricetulus griseus
tgggtgacgagtggaagtgtcatgtggtccccatcagtggcaggaatgacaaacaaggttttcccatgaagcaaggcgatttggcccatggcagagtgcgcctgctgtggagtaaggggcattcttgctataggccaaggagaaaggggtaaacctgcatagggtccaatttggccccctaaatgtgggtgacagtagtgtggcttgggcagtctgtgtggccgctggcagtgggaccaggatttatccctagtgcttgaactggctttgtggggccaattctctttggtgggataccgtgctcaacctagatatggggggagggccttggtcctcaaagtgattcgacagacttccttgatttcccatgggcggcctcaacctctacggtggcgggaggcggcgctgacggtggctgcgctttttcctgcggcttctccccccggcctcttccgcgtctcgctcctccatcgcgacggcggcggactcggcagctccgcttttatc

SEQ ID NO: 6131 - DNA, 570 bp, Cricetulus griseus; identical to SEQ ID NO: 2489

SEQ ID NO: 6132 - DNA, 423 bp, Cricetulus griseus; identical to SEQ ID NO: 2490

SEQ ID NO: 6133 - DNA, 583 bp, Cricetulus griseus; identical to SEQ ID NO: 2491

SEQ ID NO: 6134 - DNA, 438 bp, Cricetulus griseus; identical to SEQ ID NO: 2492

SEQ ID NO: 6135 - DNA, 155 bp, Cricetulus griseus
tggaagatgccggcggtgatggccggctgacagaatggtggagatggcccgtgggtcgggccaggaaaggaggacgcccgctccggtggtgacccgcccaggtgtttactagattacctgagggagagggtgggatggggcgggggctggggggt

SEQ ID NO: 6136 - DNA, 577 bp, Cricetulus griseus; identical to SEQ ID NO: 2494

SEQ ID NO: 6137 - DNA, 428 bp, Cricetulus griseus; identical to SEQ ID NO: 2495

SEQ ID NO: 6138 - DNA, 422 bp, Cricetulus griseus; identical to SEQ ID NO: 2496

SEQ ID NO: 6139 - DNA, 512 bp, Cricetulus griseus; identical to SEQ ID NO: 2497

SEQ ID NO: 6140 - DNA, 486 bp, Cricetulus griseus; identical to SEQ ID NO: 2498

SEQ ID NO: 6141 - DNA, 580 bp, Cricetulus griseus; identical to SEQ ID NO: 2499
  misc_feature (282)..(300): n is a, c, g, or t

SEQ ID NO: 6142 - DNA, 552 bp, Cricetulus griseus; identical to SEQ ID NO: 2500
  misc_feature (457)..(457): n is a, c, g, or t

SEQ ID NO: 6143 - DNA, 577 bp, Cricetulus griseus; identical to SEQ ID NO: 2501

SEQ ID NO: 6144 - DNA, 513 bp, Cricetulus griseus; identical to SEQ ID NO: 2502

SEQ ID NO: 6145 - DNA, 373 bp, Cricetulus griseus
  misc_feature (176)..(202): n is a, c, g, or t
agacagagagaaacgggaggtgggcagggcccttttaaaagggaacatagtgaatatgcacaggtggtgctcttagtggctgcaactgagggcgtatcctgtcagaatcccaaggacaggcaagtatagatgcccaaatactaacattttgcccaagacagtgccgagtgcatcannnnnnnnnnnnnnnnnnnnnnnnnnntcattgtttgaaaagaagggacagagttgtataagccatacatttgtgtttgtctattaatcagcataaaagttatattgctgtaacaaatagaccaatattcccaatgtttaatacaacattttatatttctcacataagctgcaatgatagcatgggtctgcttgttga

SEQ ID NO: 6146 - DNA, 467 bp, Cricetulus griseus; identical to SEQ ID NO: 2504
  misc_feature (94)..(94): n is a, c, g, or t

SEQ ID NO: 6147 - DNA, 523 bp, Cricetulus griseus; identical to SEQ ID NO: 2505
  misc_feature (228)..(247): n is a, c, g, or t

SEQ ID NO: 6148 - DNA, 579 bp, Cricetulus griseus; identical to SEQ ID NO: 2506

SEQ ID NO: 6149 - DNA, 579 bp, Cricetulus griseus
gacactcaaatgacagaaatacaaagtaagtagatgaaaaccaatcagcatacccttcaaggttccttcttatctttcaagctcttgtagtaactagatttacaagaaagagctttcttgagaaagggtctctctatatcagtggttctcaacatgaggttccctaccctttggggtcaaggaatcctttcacagtagtcgcctaagaccactggaaaacaaagatatttgtattacaattcataacagcagcaaaattacagtaatgaagtagcaataattttatggttgggagtcaccaaaacatgaagaactgtatgtaataaagggtcccagaattacaaaggttgagaaacaatgctctacatagtccaggcttgtgagtaaactggccttgaactcaagagatccacctacctctgtctctgaagtgctaggattaaaggcatgcgccacacacacgtaggccctcctgagaaagcttatggttcccaaatgttcacaggcctgtgttccccaaacccattttaggaattattttcataagcaacaagcacatgcttataaaatattatcagc

SEQ ID NO: 6150 - DNA, 600 bp, Cricetulus griseus; identical to SEQ ID NO: 2508
  misc_feature (555)..(555): n is a, c, g, or t

SEQ ID NO: 6151 - DNA, 356 bp, Cricetulus griseus; identical to SEQ ID NO: 2509

SEQ ID NO: 6152 - DNA, 556 bp, Cricetulus griseus; identical to SEQ ID NO: 2510

SEQ ID NO: 6153 - DNA, 539 bp, Cricetulus griseus; identical to SEQ ID NO: 2511
  misc_feature (448)..(464): n is a, c, g, or t

SEQ ID NO: 6154 - DNA, 552 bp, Cricetulus griseus; identical to SEQ ID NO: 2512

SEQ ID NO: 6155 - DNA, 529 bp, Cricetulus griseus
cttctggtcaccctgggagccttcatctttggccaaaccacagccaatgccatctttgttgacctcttggcatgaacactgccttccagaaaacatgtcaccaagaaccatctctcagagctgtgaagctaccccaagtcccacatcctgttccagctggtgacatcaggacacatttttccatggacagtcatgggacagaatcagcctcaaatctgtggacagctccccacccagctgccttcctgctccccaaccttggcattgtcatagatggtgacaggaggtcccacgtcataggagcttccccctcacccaggtctcaacttcagtcctttgggacctgttaatggagagtgtcagtgagtcacagaagagagagaccattctgacttccctctggaaaaacaaagtcttatacatagtgctggcatccaccacagagcttgtcaggcctgtgctttcagtaccttggggtttagtgcctgcccatgtctctcagaagccaatgatgacttctcctgggacc

SEQ ID NO: 6156 - DNA, 521 bp, Cricetulus griseus; identical to SEQ ID NO: 2514

SEQ ID NO: 6157 - DNA, 539 bp, Cricetulus griseus; identical to SEQ ID NO: 2515
  misc_feature (198)..(221): n is a, c, g, or t
  misc_feature (244)..(264): n is a, c, g, or t

SEQ ID NO: 6158 - DNA, 522 bp, Cricetulus griseus; identical to SEQ ID NO: 2516

SEQ ID NO: 6159 - DNA, 501 bp, Cricetulus griseus; identical to SEQ ID NO: 2517
  misc_feature (46)..(88): n is a, c, g, or t

SEQ ID NO: 6160 - DNA, 570 bp, Cricetulus griseus; identical to SEQ ID NO: 2518

SEQ ID NO: 6161 - DNA, 570 bp, Cricetulus griseus
ctttcaattcttttcttgttttcctccattttctggtttgctatagttaacaggaactcaatatattcctccgtcaccatcagttttccctgatggcttaatgggacttctaatccatgtgtactccggacagccagcatggtctttcctcgcttccccacggtgatgccagagttcctgaagccagaagcaacggccgctgagtgcagggtctgtgcgtcctgcagtgtctggcattgtacatggaggataaatggttcaaacttcaggacagcattgctggttgcgcccttcagagctgccatcacatcatctttcacacaaggtttgtgtgtcaccaggagccagcagcagtgctgtttctgaatcccagaatcgcttgtgctcgcgtccaggaggaggattcggccggcgcaggagctggtggtgaagaactcttcctgcgcgttcaggagctgcaccacccgcacggcgtcctcgtccacgctgcctttccggctgaggtccgccttgcccaggctatgcgccttccagcgcccgaactcggcgcggcggtccatcggcgtcgct

SEQ ID NO: 6162 - DNA, 438 bp, Cricetulus griseus
acaatcccaccgcatgcacacaccatagcaaaataaaaaatttaaaaaaagaaaagcagtcaggactgctgagactggaggattgctgcaagtaaaaggccagtcaggaccacaaagtgagtaccaggctagcctgggggtacagaataaggccttgttccacaccctccaccacaaagtagttgacatgacatatgaagtcatcatttgatgtgatctcagctatacgtaggtaaatagagctatttaccactgctaagcatgatgaatggtaaagctatgggtaatttctaatgactttcctttaaaatttttgtttattattatgtggcatggtgtgtgtggggtggtgtagggtgggtgggtgctcctgccacaatgcaagtggggacagctccatgcagttggttctctcctcccacctttatgctcacttca

SEQ ID NO: 6163 - DNA, 558 bp, Cricetulus griseus; identical to SEQ ID NO: 2521

SEQ ID NO: 6164 - DNA, 452 bp, Cricetulus griseus; identical to SEQ ID NO: 2522

SEQ ID NO: 6165 - DNA, 435 bp, Cricetulus griseus; identical to SEQ ID NO: 2523

SEQ ID NO: 6166 - DNA, 381 bp, Cricetulus griseus; identical to SEQ ID NO: 2524

SEQ ID NO: 6167 - DNA, 559 bp, Cricetulus griseus; identical to SEQ ID NO: 2525

SEQ ID NO: 6168 - DNA, 528 bp, Cricetulus griseus; identical to SEQ ID NO: 2526
  misc_feature (53)..(72): n is a, c, g, or t

SEQ ID NO: 6169 - DNA, 526 bp, Cricetulus griseus; identical to SEQ ID NO: 2527

SEQ ID NO: 6170 - DNA, 418 bp, Cricetulus griseus
  misc_feature (46)..(62): n is a, c, g, or t
  misc_feature (64)..(93): n is a, c, g, or t
ctttggaggctgtcctggaactagctcttatagaccaggctggtcnnnnnnnnnnnnnnnnnannnnnnnnnnnnnnnnnnnnnnnnnnnnnntaaaggcatgcgccaccacccccggccaaaatttttttagatatatactttgtggccttttgcaaggatgagttagccctgctttgctgaggaggaacaatatgcagttttgttaccctgtgaattcgccgagagggaatagtgtgtgtgggagatgagactagaggtgtggtagactctggatagacagtgtaacgttcctttgtttcatcccaacaccaaaatcacctggcccttatgagacagagggctggctacagatgtgctgggtctgtgggctgtagacagcacctgaaaggagagacaggaaatactcaactccccc

SEQ ID NO: 6171 - DNA, 537 bp, Cricetulus griseus; identical to SEQ ID NO: 2529

SEQ ID NO: 6172 - DNA, 495 bp, Cricetulus griseus; identical to SEQ ID NO: 2530

SEQ ID NO: 6173 - DNA, 531 bp, Cricetulus griseus; identical to SEQ ID NO: 2531
  misc_feature (390)..(405): n is a, c, g, or t

SEQ ID NO: 6174 - DNA, 547 bp, Cricetulus griseus; identical to SEQ ID NO: 2532

SEQ ID NO: 6175 - DNA, 557 bp, Cricetulus griseus; identical to SEQ ID NO: 2533

SEQ ID NO: 6176 - DNA, 142 bp, Cricetulus griseus; identical to SEQ ID NO: 2534

SEQ ID NO: 6177 - DNA, 343 bp, Cricetulus griseus; identical to SEQ ID NO: 2535

SEQ ID NO: 6178 - DNA, 288 bp, Cricetulus griseus; identical to SEQ ID NO: 2536
  misc_feature (131)..(148): n is a, c, g, or t

SEQ ID NO: 6179 - DNA, 377 bp, Cricetulus griseus; identical to SEQ ID NO: 2537

SEQ ID NO: 6180 - DNA, 580 bp, Cricetulus griseus; identical to SEQ ID NO: 2538

SEQ ID NO: 6181 - DNA, 580 bp, Cricetulus griseus; identical to SEQ ID NO: 2539

SEQ ID NO: 6182 - DNA, 487 bp, Cricetulus griseus; identical to SEQ ID NO: 2540

SEQ ID NO: 6183 - DNA, 545 bp, Cricetulus griseus; identical to SEQ ID NO: 2541

SEQ ID NO: 6184 - DNA, 485 bp, Cricetulus griseus; identical to SEQ ID NO: 2542

SEQ ID NO: 6185 - DNA, 285 bp, Cricetulus griseus; identical to SEQ ID NO: 2543

SEQ ID NO: 6186 - DNA, 452 bp, Cricetulus griseus; identical to SEQ ID NO: 2544

SEQ ID NO: 6187 - DNA, 410 bp, Cricetulus griseus; identical to SEQ ID NO: 2545
  misc_feature (128)..(156): n is a, c, g, or t

SEQ ID NO: 6188 - DNA, 324 bp, Cricetulus griseus; identical to SEQ ID NO: 2546

SEQ ID NO: 6189 - DNA, 579 bp, Cricetulus griseus; identical to SEQ ID NO: 2547

SEQ ID NO: 6190 - DNA, 600 bp, Cricetulus griseus; identical to SEQ ID NO: 2548
  misc_feature (346)..(364): n is a, c, g, or t

SEQ ID NO: 6191 - DNA, 600 bp, Cricetulus griseus; identical to SEQ ID NO: 2549
  misc_feature (560)..(560): n is a, c, g, or t

SEQ ID NO: 6192 - DNA, 127 bp, Cricetulus griseus
atttcatctggatttgattacttaattcaaagaccatattttagctggccatataaccaagaagctatcagccagaaaacttgaaagttataagcatttcttgaaaataagattttcaaatgtagcc

SEQ ID NO: 6193 - DNA, 498 bp, Cricetulus griseus; identical to SEQ ID NO: 2551
  misc_feature (452)..(452): n is a, c, g, or t

SEQ ID NO: 6194 - DNA, 533 bp, Cricetulus griseus; identical to SEQ ID NO: 2552

SEQ ID NO: 6195 - DNA, 491 bp, Cricetulus griseus; identical to SEQ ID NO: 2553

SEQ ID NO: 6196 - DNA, 579 bp, Cricetulus griseus; identical to SEQ ID NO: 2554
  misc_feature (248)..(274): n is a, c, g, or t
  misc_feature (359)..(377): n is a, c, g, or t

SEQ ID NO: 6197 - DNA, 536 bp, Cricetulus griseus; identical to SEQ ID NO: 2555
  misc_feature (479)..(479): n is a, c, g, or t

SEQ ID NO: 6198 - DNA, 349 bp, Cricetulus griseus
  misc_feature (99)..(99): n is a, c, g, or t
atagaactgaaatgactagaggtagaactgtaaagtgcaatatgataaaatatcctaagttgtatcaatgatcaaaatgtatatacatcaagatagttntatatttgtgcgtaaatatcgtaaacagaagaccctaagcagtcaacatacaataatctaacaatttaagttatctgtagctaacagttgctaaagttagttcactagaaaataggttaattacctatattccatcttaaccatacctttcccatccatatccttaaacttatctaaaagtctgagagtctgctcatcacattccacagcccccaaccctttctgaactcatcttatttttctatccatt

SEQ ID NO: 6199 - DNA, 487 bp, Cricetulus griseus; identical to SEQ ID NO: 2557
  misc_feature (51)..(77): n is a, c, g, or t

SEQ ID NO: 6200 - DNA, 348 bp, Cricetulus griseus; identical to SEQ ID NO: 2558
  misc_feature (101)..(118): n is a, c, g, or t

SEQ ID NO: 6201 - DNA, 200 bp, Cricetulus griseus
  misc_feature (161)..(161): n is a, c, g, or t
ctgactgaaaccagctgtggccaggaccacagaacatctgggtccatatcctgacctatttactcccttgctactctaggccaggggtactcagtgttgttttaactccattacactcagttaggtgtgtgtgtgtgtttgtgtgtatgtgcatgctgtangtgagagagagagtgagtctgtgtgcatgctgtaggtat

SEQ ID NO: 6202 - DNA, 538 bp, Cricetulus griseus; identical to SEQ ID NO: 2560
  misc_feature (66)..(86): n is a, c, g, or t

SEQ ID NO: 6203 - DNA, 483 bp, Cricetulus griseus; identical to SEQ ID NO: 2561

SEQ ID NO: 6204 - DNA, 500 bp, Cricetulus griseus
aaaaaagctaacaacaaatttccctaaattattccataaaatggaaaatgaaggaacatttctgaagtctttctaaaaagctattattacattgacaccaaaaccagacaaagacacaacaagaaagaaactgtaggtcagtatgtgcaaaaattctcaattaaaaaaagaaaaacctgcaaacaggacagattttaagttgaaggttttgtggctgggttgatgtcgcagtctcactgctgggagccttgcccagctatataaagcagtcaattccagctctctatcccccattactaggagagttcactaagggcactccaggagtaaagtggtgtagaactttgtgggagggaccaaccaatgattggtccaacttgaggcccacaccgcaagagggagtcgtgcctgacactgcctggatagccaggaaccagaggctagacaacccatagacccaggatagaaacaacacacaactgacaaattttttttttaaa

SEQ ID NO: 6205 - DNA, 475 bp, Cricetulus griseus; identical to SEQ ID NO: 2563
  misc_feature (105)..(207): n is a, c, g, or t

SEQ ID NO: 6206 - DNA, 501 bp, Cricetulus griseus; identical to SEQ ID NO: 2564

SEQ ID NO: 6207 - DNA, 173 bp, Cricetulus griseus; identical to SEQ ID NO: 2565

SEQ ID NO: 6208 - DNA, 244 bp, Cricetulus griseus; identical to SEQ ID NO: 2566
  misc_feature (40)..(58): n is a, c, g, or t

SEQ ID NO: 6209 - DNA, 566 bp, Cricetulus griseus; identical to SEQ ID NO: 2567

SEQ ID NO: 6210 - DNA, 506 bp, Cricetulus griseus; identical to SEQ ID NO: 2568
  misc_feature (157)..(157): n is a, c, g, or t

SEQ ID NO: 6211 - DNA, 330 bp, Cricetulus griseus; identical to SEQ ID NO: 2569
  misc_feature (259)..(278): n is a, c, g, or t

SEQ ID NO: 6212 - DNA, 580 bp, Cricetulus griseus; identical to SEQ ID NO: 2570

SEQ ID NO: 6213 - DNA, 520 bp, Cricetulus griseus; identical to SEQ ID NO: 2571

SEQ ID NO: 6214 - DNA, 513 bp, Cricetulus griseus; identical to SEQ ID NO: 2572

SEQ ID NO: 6215 - DNA, 526 bp, Cricetulus griseus; identical to SEQ ID NO: 2573

SEQ ID NO: 6216 - DNA, 533 bp, Cricetulus griseus; identical to SEQ ID NO: 2574

SEQ ID NO: 6217 - DNA, 345 bp, Cricetulus griseus; identical to SEQ ID NO: 2575

SEQ ID NO: 6218 - DNA, 221 bp, Cricetulus griseus; identical to SEQ ID NO: 2576

SEQ ID NO: 6219 - DNA, 555 bp, Cricetulus griseus; identical to SEQ ID NO: 2577

SEQ ID NO: 6220 - DNA, 580 bp, Cricetulus griseus; identical to SEQ ID NO: 2578

SEQ ID NO: 6221 - DNA, 578 bp, Cricetulus griseus
acaaagaccgcgaacgggaccgagagcgcgagggccctttccgcaggtcagactcattccccgaaaggagggcccctcggaaggggaacacactttatgtgtatggagaggacatgacgcccaccctcctccgaggggccttctctccctttggaaacatcattgacctctccatggacccacccagaaactgtgccttcgtcacctatgaaaagatggagtttgcagatcaggccgttgctgagctcaatgggacccaggtggaatccgtgcagctcaaagtcaacatagcccgcaaacagcccatgctggatgctgctactggcaaatctgtctggggttcccttgctgtccagaacagccctaagggctgccaccgggacaaaaggacccagattgtgtacagtgacgatctgtaggaaacctgtggatggcttttaggacacgaagctggattccttgtgcctcgtatgcccccaagctggtctcagtaaaatcctggggcagaagttccctcacccccttcagcctctagtctttcaacactgggatcggggttaaaccttcaaaagtgaaaa

SEQ ID NO: 6222 - DNA, 566 bp, Cricetulus griseus; identical to SEQ ID NO: 2580

SEQ ID NO: 6223 - DNA, 558 bp, Cricetulus griseus; identical to SEQ ID NO: 2581

SEQ ID NO: 6224 - DNA, 578 bp, Cricetulus griseus; identical to SEQ ID NO: 2582

SEQ ID NO: 6225 - DNA, 600 bp, Cricetulus griseus; identical to SEQ ID NO: 2583
  misc_feature (411)..(456): n is a, c, g, or t

SEQ ID NO: 6226 - DNA, 280 bp, Cricetulus griseus; identical to SEQ ID NO: 2584

SEQ ID NO: 6227 - DNA, 578 bp, Cricetulus griseus; identical to SEQ ID NO: 2585
  misc_feature (535)..(535): n is a, c, g, or t

SEQ ID NO: 6228 - DNA, 579 bp, Cricetulus griseus; identical to SEQ ID NO: 2586
  misc_feature (443)..(457): n is a, c, g, or t

SEQ ID NO: 6229 - DNA, 556 bp, Cricetulus griseus; identical to SEQ ID NO: 2587

SEQ ID NO: 6230 - DNA, 368 bp, Cricetulus griseus; identical to SEQ ID NO: 2588
  misc_feature (51)..(65): n is a, c, g, or t

SEQ ID NO: 6231 - DNA, 569 bp, Cricetulus griseus; identical to SEQ ID NO: 2589

SEQ ID NO: 6232 - DNA, 579 bp, Cricetulus griseus; identical to SEQ ID NO: 2590

SEQ ID NO: 6233 - DNA, 579 bp, Cricetulus griseus; identical to SEQ ID NO: 2591

SEQ ID NO: 6234 - DNA, 579 bp, Cricetulus griseus; identical to SEQ ID NO: 2592
  misc_feature (397)..(421): n is a, c, g, or t

SEQ ID NO: 6235 - DNA, 562 bp, Cricetulus griseus
attgtttttctataaatttagggtggtttttgaaaaatgacataagagagatatctgtcttagaagtgtgttatactgtacatttttgtttcctcatttatttgctttgagacatggtttgcctgtgtagaccatacatggcctcagactcatgtatgagcctccttcctcagcctccaaagtgctgggattgcaggtgtgtagtactgggtctaccgtgtactgcattttgaaaaccagaatattccagcatcagtttgcctattcttagaataagcagtcttttaaaaaattttttattacctgtttttggagtagaaatagttgtaaactgatactgtgttcagttcaaattctgtctctgccaataactaaccagtttcctgaagtggttttccctgtcctgctgaagctccctcatctgtgcagtgtgcagatggtctcttaagcaccttctcgtttcagagtgctgggtttttcgactttagtttttaatagattttggtgtaacacactagataggtatatgatttagatatttttatttcatctctacatatga

SEQ ID NO: 6236 - DNA, 349 bp, Cricetulus griseus; identical to SEQ ID NO: 2594

SEQ ID NO: 6237 - DNA, 576 bp, Cricetulus griseus; identical to SEQ ID NO: 2595
  misc_feature (271)..(292): n is a, c, g, or t

SEQ ID NO: 6238 - DNA, 576 bp, Cricetulus griseus
  misc_feature (285)..(306): n is a, c, g, or t
tttgtgaattagagtaatacaatgattgtgttattgttttaggtgaaattgctaagtacatgcaaactgtgaaattactggactacactgagaaacctgtttatcaggatttacgtgacattctttcacaaggactaaaagccataggaagtaaagatgatggcaaactggattttagtgctgtggagaatggaagtatggagacagaaccagcctcaaagatgaggcctcttgcttttcattctaccccatcgttttgcttttcaccacagaacgtaagtgtgnnnnnnnnnnnnnnnnnnnnnngttagtttaaacctcatacgtacttggtacttggtgaacctttgtgtaaggatatatcactcatcttggaactcagaaactaatctttgtaagcaagagcatgcttcctttttcatctccagaagccatggaactgtggacggagagcattagaaaccacagagttggcttctggctacacatgcgcatatctacccacccagtcctgcagttactaaattctctgtctctcagtctctgtctctctctgactctgtatctctgtctttc

SEQ ID NO: 6239 - DNA, 578 bp, Cricetulus griseus; identical to SEQ ID NO: 2597
  misc_feature (289)..(335): n is a, c, g, or t

SEQ ID NO: 6240 - DNA, 554 bp, Cricetulus griseus; identical to SEQ ID NO: 2598

SEQ ID NO: 6241 - DNA, 555 bp, Cricetulus griseus; identical to SEQ ID NO: 2599
  misc_feature (460)..(460): n is a, c, g, or t

SEQ ID NO: 6242 - DNA, 568 bp, Cricetulus griseus; identical to SEQ ID NO: 2600

SEQ ID NO: 6243 - DNA, 578 bp, Cricetulus griseus; identical to SEQ ID NO: 2601

SEQ ID NO: 6244 - DNA, 427 bp, Cricetulus griseus; identical to SEQ ID NO: 2602

SEQ ID NO: 6245 - DNA, 569 bp, Cricetulus griseus
tatttggcactggacattcagcaccatctgccagtccagcatttggtgctaacccgaccccaacatttggacaaagtcaaggtgccagccaacctaaccctccaagctttggctctatatcatcttcaacatcgttgttttctgctggttcccagcctgcaccaccacctacttttggggcagtgtcaagcagcagccaacctcctgtgtttgggcagcagcctagtcagtctgcatttggctctgggacagctcctaattccagttctgttttccaatttggcagcagcaccacaaatttcaacttcacaaacaataatccgtcaggagtgttcacatttggtgcaaatcccagcacgccagcagcctcagcccaaccctcaggttcagggggctttcaattcagccagtctccagcatcatttacagtggggtcaaatgggaaaaatatgttctcttcttccggaacttcagtttctggtcgcaagataaagactgctgtcagacgcaggaaataaaggtcacgaaggtgttatacccaacagttttatcaacggctggtgcctgct

SEQ ID NO: 6246 - DNA, 580 bp, Cricetulus griseus; identical to SEQ ID NO: 2604

SEQ ID NO: 6247 - DNA, 568 bp, Cricetulus griseus; identical to SEQ ID NO: 2605
  misc_feature (408)..(408): n is a, c, g, or t

SEQ ID NO: 6248 - DNA, 236 bp, Cricetulus griseus
  misc_feature (139)..(159): n is a, c, g, or t
cttgaaggagaagaaggaagttgtggaggagacagagaatggaagagacgcacctgccaatggaaatgctaatgaggaaaatggggagcaggaggctgacaatgaggtagatgaagaagaggaagaaggtggggaggannnnnnnnnnnnnnnnnnnnngcgacggtgaggaagaggatggagatgaagatgaggaagctgaggctcctacgggcaagcgggtagctgaagatgat

SEQ ID NO: 6249 - DNA, 580 bp, Cricetulus griseus; identical to SEQ ID NO: 2607
  misc_feature (96)..(111): n is a, c, g, or t

SEQ ID NO: 6250 - DNA, 469 bp, Cricetulus griseus; identical to SEQ ID NO: 2608

SEQ ID NO: 6251 - DNA, 523 bp, Cricetulus griseus; identical to SEQ ID NO: 2609

SEQ ID NO: 6252 - DNA, 385 bp, Cricetulus griseus; identical to SEQ ID NO: 2610

SEQ ID NO: 6253 - DNA, 579 bp, Cricetulus griseus; identical to SEQ ID NO: 2611

SEQ ID NO: 6254 - DNA, 554 bp, Cricetulus griseus; identical to SEQ ID NO: 2612

SEQ ID NO: 6255 - DNA, 550 bp, Cricetulus griseus
agactttatgggaagggtgggtggcagtagtgaacaaatgtcactctgtcccttataaaaccagtaaaagggagtattggagtttgaatgttggcagcaggtcatcaggcagggtgcaccttccacagaggagtacaaggtatgcccagccaacattctggagtcggttgagggaaggggatgtattaattggcagcacattgcctggcactcactccacagagtggcaggtttgatggcactagttaaggccactcataccccctaagaaatgatgttggggatgggcagctgtgctgggctgtctgtctccctgcctggggccacatggtgtccacatacagagcgtaatggatgggagtcaggaccagagtcacctcttataatgccagcagctgttagactctgatgtctacaaatgacaaggaaagttgtgttttcactttctgggaactcctataagccctggctcaaggactttgcattgtgtgtcatgtacatctttttaagtgttctttgctgttctggaattgtcgttggtttttcctta

SEQ ID NO: 6256 - DNA, 579 bp, Cricetulus griseus; identical to SEQ ID NO: 2614

SEQ ID NO: 6257 - DNA, 578 bp, Cricetulus griseus; identical to SEQ ID NO: 2615

SEQ ID NO: 6258 - DNA, 566 bp, Cricetulus griseus; identical to SEQ ID NO: 2616
  misc_feature (508)..(508): n is a, c, g, or t

SEQ ID NO: 6259 - DNA, 389 bp, Cricetulus griseus
tcttctttcatttatattttttgactcttacctctatatttttgttgttaataaaccaactgccacagggcgggacacacgatggagttctaaggacagaagggactagaagaaggaggagtcgcgcgacaatggatcttactgatcccaaaggaaatgttaaacccgtattacggcgcactttgaatattcagctacgaataattacaccctccaaataaatccaaactcgcggcctgtgtaatgaagatcacctgtcttacttcaagactcattgtttactgaggctggaatggctgttaatcatggcaagctgctagactagctggttacaccaccccttttacaagatgatgcttcagaagccgataaccctgcatgacatggcc

SEQ ID NO: 6260 - DNA, 571 bp, Cricetulus griseus; identical to SEQ ID NO: 2618

SEQ ID NO: 6261 - DNA, 569 bp, Cricetulus griseus; identical to SEQ ID NO: 2619

SEQ ID NO: 6262 - DNA, 579 bp, Cricetulus griseus; identical to SEQ ID NO: 2620

SEQ ID NO: 6263 - DNA, 579 bp, Cricetulus griseus; identical to SEQ ID NO: 2621

SEQ ID NO: 6264 - DNA, 581 bp, Cricetulus griseus; identical to SEQ ID NO: 2622

SEQ ID NO: 6265 - DNA, 566 bp, Cricetulus griseus; identical to SEQ ID NO: 2623

SEQ ID NO: 6266 - DNA, 485 bp, Cricetulus griseus; identical to SEQ ID NO: 2624
  misc_feature (447)..(447): n is a, c, g, or t

SEQ ID NO: 6267 - DNA, 279 bp, Cricetulus griseus; identical to SEQ ID NO: 2625

SEQ ID NO: 6268 - DNA, 546 bp, Cricetulus griseus; identical to SEQ ID NO: 2626
  misc_feature (452)..(469): n is a, c, g, or t

SEQ ID NO: 6269 - DNA, 580 bp, Cricetulus griseus; identical to SEQ ID NO: 2627

SEQ ID NO: 6270 - DNA, 530 bp, Cricetulus griseus; identical to SEQ ID NO: 2628

SEQ ID NO: 6271 - DNA, 480 bp, Cricetulus griseus; identical to SEQ ID NO: 2629

SEQ ID NO: 6272 - DNA, 579 bp, Cricetulus griseus; identical to SEQ ID NO: 2630

SEQ ID NO: 6273 - DNA, 547 bp, Cricetulus griseus; identical to SEQ ID NO: 2631

SEQ ID NO: 6274 - DNA, 496 bp, Cricetulus griseus; identical to SEQ ID NO: 2632

SEQ ID NO: 6275 - DNA, 578 bp, Cricetulus griseus; identical to SEQ ID NO: 2633

SEQ ID NO: 6276 - DNA, 260 bp, Cricetulus griseus; identical to SEQ ID NO: 2634

SEQ ID NO: 6277 - DNA, 555 bp, Cricetulus griseus; identical to SEQ ID NO: 2635

SEQ ID NO: 6278 - DNA, 418 bp, Cricetulus griseus; identical to SEQ ID NO: 2636

SEQ ID NO: 6279 - DNA, 483 bp, Cricetulus griseus; identical to SEQ ID NO: 2637

SEQ ID NO: 6280 - DNA, 425 bp, Cricetulus griseus; identical to SEQ ID NO: 2638

SEQ ID NO: 6281 - DNA, 425 bp, Cricetulus griseus
ttaatggctttcctggcccaaagtccaaatgctaccacaatcctccctgaaacacaaagccaggtttgtcacagcagcacaccatataatctaataccaatttctgtcttagtttgggtttccaatgctgtgataaagcaccataaccaaaagcaacttgaggaggaaagggtttatttctacttacacttcacattaacagtcattcaccaaaggaagttagagcagaaactcaagacaggaactttgaggcaggatttgaagtaggggccgtggaggaatgctactactggctttctcagcccacttttttttttaatcactcaggaccacctacccacgggtggaatcacatcccatgagatcagcctacctacatcagtctttaatcaagagaatgcacaacagacttgtctactggccaa

SEQ ID NO: 6282 - DNA, 494 bp, Cricetulus griseus; identical to SEQ ID NO: 2640

SEQ ID NO: 6283 - DNA, 243 bp, Cricetulus griseus; identical to SEQ ID NO: 2641

SEQ ID NO: 6284 - DNA, 527 bp, Cricetulus griseus; identical to SEQ ID NO: 2642
  misc_feature (50)..(119): n is a, c, g, or t
  misc_feature (148)..(165): n is a, c, g, or t
  misc_feature (176)..(194): n is a, c, g, or t
  misc_feature (318)..(350): n is a, c, g, or t

SEQ ID NO: 6285 - DNA, 565 bp, Cricetulus griseus; identical to SEQ ID NO: 2643

SEQ ID NO: 6286 - DNA, 558 bp, Cricetulus griseus
tttgtaagcttctcagaagttttcagcagtcatgtgggaaagatatccaggttggagtaattggtttcccaaatgtggggaaaagcagcatcattaatagcttaaaacaagaacggatatgtactgttggagttcctatgggacttacaaggagcatgcagattgtcccgttggacaagcagatcacagtcatagatagtccatgcttcattatctcaccatgtaactcctctgctgcacttgctttacggagtccagtaagcattgaagtactaagaccattggaggctgccagtgccattctatcccaggctgatagtcaacaggtggtattaaaatacactgtcccggggtataaggattctctggatttttttactaaacttgctcagaaaagaggtctgcaccaaaaaggtggaagcccaaatattgaaagtgctgctaaactgctatggtctgagtggacaggtgcctcattaggttactactgtcaccctcctgcatcctggaatcctccacattttaatgagaatattgcagcaaacatgaagaaaggct

SEQ ID NO: 6287 - DNA, 580 bp, Cricetulus griseus; identical to SEQ ID NO: 2645

SEQ ID NO: 6288 - DNA, 464 bp, Cricetulus griseus; identical to SEQ ID NO: 2646

SEQ ID NO: 6289 - DNA, 493 bp, Cricetulus griseus; identical to SEQ ID NO: 2647

SEQ ID NO: 6290 - DNA, 236 bp, Cricetulus griseus
tttccctggatatcctgtgagtatttctatcaaaatactaaaatcatttttatcttttgtctgttttcagtcctgttgtcttgccttacagcaagtggaggagaggtctgagacattgagtccagctttttggccagggagaaagtttattgaacaaaggaagaatctcttccactcttaaaacattgtcagtatgactaagatccacaatgctaggctttgtgtgtgactagtta

SEQ ID NO: 6291 - DNA, 490 bp, Cricetulus griseus; identical to SEQ ID NO: 2649
  misc_feature (173)..(232): n is a, c, g, or t

SEQ ID NO: 6292 - DNA, 251 bp, Cricetulus griseus; identical to SEQ ID NO: 2650

SEQ ID NO: 6293 - DNA, 430 bp, Cricetulus griseus; identical to SEQ ID NO: 2651
  misc_feature (333)..(350): n is a, c, g, or t

SEQ ID NO: 6294 - DNA, 310 bp, Cricetulus griseus
aatcttcaaactaacacagtagcccaagaagaacagatttcattttttgcagcacagaactcaatttctccacttcagtcaacatcaaacaccgagcagcaagctgcttttcaacagcagcctccaatctcacacatcccaacccctattctttcccaggaacaggcacaatctactcagcaaggtttatttcagcctcaggtggcccttggctcccttccatctaattcaatatctcaaaaccagcaaggagcaattttccaaacacagcactcaatagttggcatgcagagtaactctccatcccagg

SEQ ID NO: 6295 - DNA, 522 bp, Cricetulus griseus; identical to SEQ ID NO: 2653

SEQ ID NO: 6296 - DNA, 298 bp, Cricetulus griseus; identical to SEQ ID NO: 2654

SEQ ID NO: 6297 - DNA, 538 bp, Cricetulus griseus; identical to SEQ ID NO: 2655

SEQ ID NO: 6298 - DNA, 433 bp, Cricetulus griseus
tttccaatatgaagactgtagattgtgtggagcgcaagggcaagtacatgtacttcacagtggtgatggcgaagggcaaagagatcgactttcggtgcccccaggaccagggctggaactcggagatcacgttgcagatggtgcaatacaaaaatcgtcaggccatactggcagtcaaatctacgcggcagaagcagcagcacctggtccagcagcagcctccgcagacgcagcagatccagccccagccccagccccagccccagccccagccccagccgcagccccagtcccagccgcagatccagcctcaaccgcagatccagcctcaaccacagattcagccacaaccgcagcccaagcctcagccgcagcagctccactcttacccgcacccgcacccgcacccgcacgcgcaccctcatcctcaccc

SEQ ID NO: 6299 - DNA, 541 bp, Cricetulus griseus; identical to SEQ ID NO: 2657

SEQ ID NO: 6300 - DNA, 306 bp, Cricetulus griseus; identical to SEQ ID NO: 2658

SEQ ID NO: 6301 - DNA, 370 bp, Cricetulus griseus
tccgccctgagcactcacacaagcactttctcagcactgctgctgcgggcagtgtttggacagcatcacctgcatgatgtttctgcatcattccctaagtctggtttcatattaagtgttgccatctagtgacacccacagtcacttcacaggcccaccatcatgctctcacagaactcaacttgtatcctcagtaataaaatcagccacaaaaggagaaaacagccagcagggttgcttaaagaagaaatgcactgttttttcttttctttttttttttgaaacaaaatctcactcactttgtagccctacctggctggaactcactatgtaaagcaaactggcttgaactcaaaaatccccctgcctt

SEQ ID NO: 6302 - DNA, 433 bp, Cricetulus griseus
agcaaatcagctagcatctgcaatacaatgcagagcagagctctggaggttaggaccctgagaaattctctaatagaatcagttctccactcccaacaagtaaactagtttataattgtttcaaagaagaagttagtatatcatccccttgtattcatccttgtctattaaaatataacaccacataaaaggtcagcgatcagattcatttttgaagctacatgttaaaatttattctgtggtcaggcttcagtaatactatgtaactacaactacatctactagttattatctctctgtcaatctccatctgaatattatatcacaacaagagtgtcatctaaactttccggtttccagaaaaaatgtttaaatgcaaatagtgtttacatttaataacaaaacataagaatcctttttggagattttatgt

SEQ ID NO: 6303 - DNA, 513 bp, Cricetulus griseus
  misc_feature (332)..(347): n is a, c, g, or t
acatggtacctgctccagtgccgcgtgcggcccgggaaccctgggctgctggcgcctgcgcagagtcctctgtcccagggaaaggctcgggcaaaaggcggttgagattggcagagtgaaatattactgctgagggaacgtagcagggcacacgtctctctgtgtgtctgggtgcctcgtttctccaccacctacttacttcctggttgcagcttctctccttttgggacttttgcacccgaagctccagatttgctaccctgcagtgttgcggaaccttcaggagtggcatcggtgcactgcagagaccctaccctccttgctaccttacnnnnnnnnnnnnnnnnggctgattccttacacacattctctctgctcttcccatgcaaatcagacctcggttgcctcagcgtcctacccttctgcagggctgcagcccggccaccccaaaaccttattgcttggtgcctggaatcctgattttcagccgcggggtccacttgtctccctcag

SEQ ID NO: 6304 - DNA, 491 bp, Cricetulus griseus; identical to SEQ ID NO: 2662

SEQ ID NO: 6305 - DNA, 579 bp, Cricetulus griseus; identical to SEQ ID NO: 2663

SEQ ID NO: 6306 - DNA, 256 bp, Cricetulus griseus; identical to SEQ ID NO: 2664
  misc_feature (111)..(141): n is a, c, g, or t

SEQ ID NO: 6307 - DNA, 562 bp, Cricetulus griseus; identical to SEQ ID NO: 2665

SEQ ID NO: 6308 - DNA, 535 bp, Cricetulus griseus; identical to SEQ ID NO: 2666

SEQ ID NO: 6309 - DNA, 475 bp, Cricetulus griseus; identical to SEQ ID NO: 2667

SEQ ID NO: 6310 - DNA, 517 bp, Cricetulus griseus; identical to SEQ ID NO: 2668

SEQ ID NO: 6311 - DNA, 562 bp, Cricetulus griseus; identical to SEQ ID NO: 2669
  misc_feature (107)..(126): n is a, c, g, or t
  misc_feature (177)..(205): n is a, c, g, or t

SEQ ID NO: 6312 - DNA, 562 bp, Cricetulus griseus
  misc_feature (358)..(386): n is a, c, g, or t
  misc_feature (437)..(456): n is a, c, g, or t
agcacaccatgaatggggttaatttgaatttcacttagttttaccaggcatgttttgcttattatatgtggctttactggtagcgtatttctaagaaaaataaggtcatcttcagttaaggaagaacctagaatgtaaaagaattggcttatacattatgtaaatgaaagcgcatttaaaagctgtttcatcaaacacaacttctttactttgtaaaacctctcattaaaggtagagttctgcctcttacatgcaaaactggtaatcaaatcatgtaaagaaattttgactgccaaaatacatgtgaaaaaaacaatagttcagctgggcagtggtgactcacgcctccagtcccacnnnnnnnnnnnnnnnnnnnnnnnnnnnnncgagctcaaggccagcccggtctagcaagttccaggacagctagggctgtnnnnnnnnnnnnnnnnnnnnggagaaacaaactaacaaatatagaaacaaaacaaaaatgatagttctggatgatatcatttcccatccagcccaatgtgctgacaggtatgtgtgggtgggtgta

SEQ ID NO: 6313 - DNA, 410 bp, Cricetulus griseus
  misc_feature (29)..(51): n is a, c, g, or t
  misc_feature (53)..(80): n is a, c, g, or t
  misc_feature (275)..(309): n is a, c, g, or t
cagagtgagtgtcaggacaggctccaaannnnnnnnnnnnnnnnnnnnnnngnnnnnnnnnnnnnnnnnnnnnnnnnnnngttatttcccactcagaaggcataaggtgtgcgccaccaccacttggcgatttattttattttcatttatgtgtatacctgtgtgaatctatatgtatgcaaacatgcctgtgtgtgcccttggagaccaaaacggggcatcagatcccctggagctggagtttcaggcaactgtgagctgtctagtgagtgtgnnnnnnnnnnnnnnnnnnnnnnnnnnnnnnnnnnngagtgctcttacctgccaaacctaacaactctatggctcacaaggttcagttaagctcattagaggcctaaggacaagctcctgcttcgacgcaaggagta

SEQ ID NO: 6314 - DNA, 533 bp, Cricetulus griseus; identical to SEQ ID NO: 2672

SEQ ID NO: 6315 - DNA, 444 bp, Cricetulus griseus; identical to SEQ ID NO: 2673
  misc_feature (363)..(405): n is a, c, g, or t

SEQ ID NO: 6316 - DNA, 566 bp, Cricetulus griseus; identical to SEQ ID NO: 2674

SEQ ID NO: 6317 - DNA, 558 bp, Cricetulus griseus; identical to SEQ ID NO: 2675
  misc_feature (182)..(202): n is a, c, g, or t

SEQ ID NO: 6318 - DNA, 508 bp, Cricetulus griseus; identical to SEQ ID NO: 2676

SEQ ID NO: 6319 - DNA, 429 bp, Cricetulus griseus; identical to SEQ ID NO: 2677

SEQ ID NO: 6320 - DNA, 84 bp, Cricetulus griseus; identical to SEQ ID NO: 2678

SEQ ID NO: 6321 - DNA, 577 bp, Cricetulus griseus; identical to SEQ ID NO: 2679
  misc_feature (31)..(46): n is a, c, g, or t
  misc_feature (309)..(321): n is a, c, g, or t
  misc_feature (323)..(337): n is a, c, g, or t

SEQ ID NO: 6322 - DNA, 538 bp, Cricetulus griseus; identical to SEQ ID NO: 2680

SEQ ID NO: 6323 - DNA, 567 bp, Cricetulus griseus; identical to SEQ ID NO: 2681

SEQ ID NO: 6324 - DNA, 567 bp, Cricetulus griseus
tgcaatgtggtataaggcactcattgcattcatgttaaacagtggtggcttccgctccgccagctcaatacaggttatccccaaggaccagacatctactttgccatcgtattgcccctcatccatggctaggatcacctctggagccatccagtatggagtgcccacaaaggagttagcaggtgccatgatagatgcggagccaaagtcccccaattttaccaagcctggttcagacagcaagatgtttccagccttcacatccctatggatcatgttgtgcgagtgtagatatgccaggccctgaagtgccccatgagtcacagctgcaatctctacctcctgaaggggcttcttgtgcacttctagaagatcagaagctgagcccaggcaatactccatcaccagccaagctgtgtgctccctcaggtaacagccccggtactgaatagtattgggatgtcgtagcttctgtaagaaccgcacctccttgatgatgtcctgccatttctcatttgactgcttcccactataggacattttcttgatggccaccacctcactgtt

SEQ ID NO: 6325 - DNA, 432 bp, Cricetulus griseus; identical to SEQ ID NO: 2683

SEQ ID NO: 6326 - DNA, 575 bp, Cricetulus griseus; identical to SEQ ID NO: 2684

SEQ ID NO: 6327 - DNA, 536 bp, Cricetulus griseus; identical to SEQ ID NO: 2685

SEQ ID NO: 6328 - DNA, 370 bp, Cricetulus griseus
aagaagtgttttctataattcttcaagtgtcaacttttaatacatgaattaaatccagttaagcttagcagtctccctgcaaggtcaactccagtatatgcacggactgaggaggtgacaagatactcctgtgttccttccagtcagcccttggattacttggaatttccacctggaaggttgcttctccacagtgatttcacattacaggaaggttttccttctttgtttctcagacctggtcctgtagacgggaaggagcctggacacagtgacccaacacattcacaaaggccctgcaggaccaccatggcttatgatgactccatgaagaaagaagattgctttgatggtgatcacagctttgaag

SEQ ID NO: 6329 - DNA, 472 bp, Cricetulus griseus; identical to SEQ ID NO: 2687

SEQ ID NO: 6330 - DNA, 552 bp, Cricetulus griseus; identical to SEQ ID NO: 2688

SEQ ID NO: 6331 - DNA, 419 bp, Cricetulus griseus; identical to SEQ ID NO: 2689

SEQ ID NO: 6332 - DNA, 580 bp, Cricetulus griseus; identical to SEQ ID NO: 2690
  misc_feature (177)..(191): n is a, c, g, or t

SEQ ID NO: 6333 - DNA, 478 bp, Cricetulus griseus; identical to SEQ ID NO: 2691

SEQ ID NO: 6334 - DNA, 586 bp, Cricetulus griseus; identical to SEQ ID NO: 2692

SEQ ID NO: 6335 - DNA, 263 bp, Cricetulus griseus; identical to SEQ ID NO: 2693
  misc_feature (41)..(58): n is a, c, g, or t
  misc_feature (99)..(165): n is a, c, g, or t

SEQ ID NO: 6336 - DNA, 537 bp, Cricetulus griseus; identical to SEQ ID NO: 2694
  misc_feature (419)..(453): n is a, c, g, or t

SEQ ID NO: 6337 - DNA, 544 bp, Cricetulus griseus; identical to SEQ ID NO: 2695

SEQ ID NO: 6338 - DNA, 430 bp, Cricetulus griseus
  misc_feature (333)..(365): n is a, c, g, or t
agtgtgttcaccagcctagtgaacgttgctcattttaaacctacacagacacacagacacagacacacacacaccctagtgtgttcaccagcccactgaacactatactcattttaaaccatctgctagctctacagggggccaggaggaagttcagcatgtagggcagacatgagcaggagggcatgagcgcctgcacacccacctcgaacgccgcactgtccggtaggcactgggcagagagtgcttggcttttgagtgggatctagacctgggcttggaagacgagtggtacttgggggagcgggacctcgttcgagaccgttttttgtnnnnnnnnnnnnnnnnnnnnnnnnnnnnnnnnntcggtgggtctctacatctacttgaaggcctttctggaggcttcacctctaacatgggcagagtt

SEQ ID NO: 6339 - DNA, 408 bp, Cricetulus griseus; identical to SEQ ID NO: 2697

SEQ ID NO: 6340 - DNA, 579 bp, Cricetulus griseus; identical to SEQ ID NO: 2698

SEQ ID NO: 6341 - DNA, 544 bp, Cricetulus griseus; identical to SEQ ID NO: 2699

SEQ ID NO: 6342 - DNA, 546 bp, Cricetulus griseus; identical to SEQ ID NO: 2700

SEQ ID NO: 6343 - DNA, 570 bp, Cricetulus griseus; identical to SEQ ID NO: 2701
  misc_feature (75)..(112): n is a, c, g, or t

SEQ ID NO: 6344 - DNA, 389 bp, Cricetulus griseus; identical to SEQ ID NO: 2702
  misc_feature (53)..(67): n is a, c, g, or t

SEQ ID NO: 6345 - DNA, 444 bp, Cricetulus griseus; identical to SEQ ID NO: 2703

SEQ ID NO: 6346 - DNA, 302 bp, Cricetulus griseus; identical to SEQ ID NO: 2704
  misc_feature (117)..(139): n is a, c, g, or t

SEQ ID NO: 6347 - DNA, 580 bp, Cricetulus griseus; identical to SEQ ID NO: 2705
  misc_feature (343)..(343): n is a, c, g, or t

SEQ ID NO: 6348 - DNA, 505 bp, Cricetulus griseus; identical to SEQ ID NO: 2706

SEQ ID NO: 6349 - DNA, 485 bp, Cricetulus griseus; identical to SEQ ID NO: 2707
  misc_feature (359)..(425): n is a, c, g, or t

SEQ ID NO: 6350 - DNA, 538 bp, Cricetulus griseus; identical to SEQ ID NO: 2708

SEQ ID NO: 6351 - DNA, 504 bp, Cricetulus griseus; identical to SEQ ID NO: 2709

SEQ ID NO: 6352 - DNA, 538 bp, Cricetulus griseus; identical to SEQ ID NO: 2710

SEQ ID NO: 6353 - DNA, 461 bp, Cricetulus griseus; identical to SEQ ID NO: 2711

SEQ ID NO: 6354 - DNA, 546 bp, Cricetulus griseus; identical to SEQ ID NO: 2712

SEQ ID NO: 6355 - DNA, 532 bp, Cricetulus griseus; identical to SEQ ID NO: 2713

SEQ ID NO: 6356 - DNA, 472 bp, Cricetulus griseus; identical to SEQ ID NO: 2714

SEQ ID NO: 6357 - DNA, 393 bp, Cricetulus griseus; identical to SEQ ID NO: 2715
  misc_feature (243)..(299): n is a, c, g, or t

SEQ ID NO: 6358 - DNA, 467 bp, Cricetulus griseus; identical to SEQ ID NO: 2716

SEQ ID NO: 6359 - DNA, 555 bp, Cricetulus griseus; identical to SEQ ID NO: 2717

SEQ ID NO: 6360 - DNA, 478 bp, Cricetulus griseus; identical to SEQ ID NO: 2718

SEQ ID NO: 6361 - DNA, 478 bp, Cricetulus griseus; identical to SEQ ID NO: 2719

SEQ ID NO: 6362 - DNA, 555 bp, Cricetulus griseus; identical to SEQ ID NO: 2720

SEQ ID NO: 6363 - DNA, 578 bp, Cricetulus griseus; identical to SEQ ID NO: 2721

SEQ ID NO: 6364 - DNA, 181 bp, Cricetulus griseus; identical to SEQ ID NO: 2722

SEQ ID NO: 6365 - DNA, 531 bp, Cricetulus griseus; identical to SEQ ID NO: 2723

SEQ ID NO: 6366 - DNA, 467 bp, Cricetulus griseus; identical to SEQ ID NO: 2724

SEQ ID NO: 6367 - DNA, 523 bp, Cricetulus griseus; identical to SEQ ID NO: 2725

SEQ ID NO: 6368 - DNA, 471 bp, Cricetulus griseus; identical to SEQ ID NO: 2726
  misc_feature (43)..(62): n is a, c, g, or t

SEQ ID NO: 6369 - DNA, 581 bp, Cricetulus griseus; identical to SEQ ID NO: 2727
  misc_feature (34)..(69): n is a, c, g, or t

SEQ ID NO: 6370 - DNA, 578 bp, Cricetulus griseus; identical to SEQ ID NO: 2728
  misc_feature (177)..(235): n is a, c, g, or t

SEQ ID NO: 6371 - DNA, 543 bp, Cricetulus griseus; identical to SEQ ID NO: 2729
  misc_feature (222)..(222): n is a, c, g, or t

SEQ ID NO: 6372 - DNA, 493 bp, Cricetulus griseus; identical to SEQ ID NO: 2730

SEQ ID NO: 6373 - DNA, 578 bp, Cricetulus griseus; identical to SEQ ID NO: 2731

SEQ ID NO: 6374 - DNA, 521 bp, Cricetulus griseus; identical to SEQ ID NO: 2732

SEQ ID NO: 6375 - DNA, 580 bp, Cricetulus griseus; identical to SEQ ID NO: 2733

SEQ ID NO: 6376 - DNA, 503 bp, Cricetulus griseus; identical to SEQ ID NO: 2734

SEQ ID NO: 6377 - DNA, 523 bp, Cricetulus griseus; identical to SEQ ID NO: 2735

SEQ ID NO: 6378 - DNA, 549 bp, Cricetulus griseus; identical to SEQ ID NO: 2736
  misc_feature (109)..(123): n is a, c, g, or t

SEQ ID NO: 6379 - DNA, 498 bp, Cricetulus griseus; identical to SEQ ID NO: 2737
  misc_feature (464)..(464): n is a, c, g, or t

SEQ ID NO: 6380 - DNA, 474 bp, Cricetulus griseus
ccaccaggagcagatgctggcccagtacatggagagcttcactcagggctccattgaggcccacaagaggggctcccgcttctggattcaggacaaaggccctattgtagagagttacattggcttcattgagagctaccgtgacccctttggctcccgaggagagtttgaaggcttcgtggccatggtgaacaaagccatgagtgccaagtttgagcggctggtggcaagtgctgagcagctgctcaaggagctaccctggcctcctgcctttgagaaggataagttcctcacccctgacttcacctccctggatgtcctcacctttgctggctctggcatccctgccggcatcaacatccccaactacgatgacctgagacagacggaaggctttaagaatgtgtctctcgggaatgtgctggccgtggcctatgccacaaagcgggagaaactcacgttcttggaggaaga

SEQ ID NO: 6381 - DNA, 372 bp, Cricetulus griseus; identical to SEQ ID NO: 2739

SEQ ID NO: 6382 - DNA, 507 bp, Cricetulus griseus; identical to SEQ ID NO: 2740

SEQ ID NO: 6383 - DNA, 536 bp, Cricetulus griseus; identical to SEQ ID NO: 2741

SEQ ID NO: 6384 - DNA, 598 bp, Cricetulus griseus; identical to SEQ ID NO: 2742

SEQ ID NO: 6385 - DNA, 523 bp, Cricetulus griseus; identical to SEQ ID NO: 2743
  misc_feature (222)..(240): n is a, c, g, or t
  misc_feature (463)..(478): n is a, c, g, or t

SEQ ID NO: 6386 - DNA, 556 bp, Cricetulus griseus; identical to SEQ ID NO: 2744

SEQ ID NO: 6387 - DNA, 473 bp, Cricetulus griseus; identical to SEQ ID NO: 2745

SEQ ID NO: 6388 - DNA, 553 bp, Cricetulus griseus; identical to SEQ ID NO: 2746

SEQ ID NO: 6389 - DNA, 559 bp, Cricetulus griseus; identical to SEQ ID NO: 2747
  misc_feature (39)..(53): n is a, c, g, or t

SEQ ID NO: 6390 - DNA, 496 bp, Cricetulus griseus; identical to SEQ ID NO: 2748

SEQ ID NO: 6391 - DNA, 521 bp, Cricetulus griseus; identical to SEQ ID NO: 2749

SEQ ID NO: 6392 - DNA, 579 bp, Cricetulus griseus; identical to SEQ ID NO: 2750

SEQ ID NO: 6393 - DNA, 418 bp, Cricetulus griseus; identical to SEQ ID NO: 2751

SEQ ID NO: 6394 - DNA, 505 bp, Cricetulus griseus; identical to SEQ ID NO: 2752

SEQ ID NO: 6395 - DNA, 573 bp, Cricetulus griseus; identical to SEQ ID NO: 2753

SEQ ID NO: 6396 - DNA, 579 bp, Cricetulus griseus; identical to SEQ ID NO: 2754

SEQ ID NO: 6397 - DNA, 404 bp, Cricetulus griseus; identical to SEQ ID NO: 2755
  misc_feature (139)..(166): n is a, c, g, or t

SEQ ID NO: 6398 - DNA, 402 bp, Cricetulus griseus; identical to SEQ ID NO: 2756

SEQ ID NO: 6399 - DNA, 490 bp, Cricetulus griseus; identical to SEQ ID NO: 2757

SEQ ID NO: 6400 - DNA, 526 bp, Cricetulus griseus; identical to SEQ ID NO: 2758
  misc_feature (465)..(465): n is a, c, g, or t

SEQ ID NO: 6401 - DNA, 541 bp, Cricetulus griseus
  misc_feature (174)..(186): n is a, c, g, or t
cttggggagctcccatttcctgggagcaggccgacccctttgcatctttaaaaaaagtgggccaagattccatagtgctgctgatttgtatcacggtgtttctctcctacctaccggaggcaggccagtactccagcttcttcttatacctcagacagataatgaaattttccnnnnnnnnnnnnncagcctttatagcagtccttggcattctgtccattattgcacagaccatagtcttgagtttactcatgagatcaattggaaataagaataccatcttattgggtctgggatttcaaatattgcagctggcatggtatggctttggttcagaaccttggatgatgtgggctgctggggcagtcgcagccatgtctagcattacctttccagctgttagtgcccttggttcacgaactgctgatgctgatcaacagggtgttgttcaaagaatgataacaggaatccgaggattgtgcaatggtctgggaccagccctttatgggttcattttctacatattccatgtggaacttaa

SEQ ID NO: 6402 - DNA, 116 bp, Cricetulus griseus
ctccaagggatcaaccccctttattacccaatgtaggcacacaacggaagggggcacatgcacatacacactcctttatacacttaagacacagacagatgcccccatacatgaat

SEQ ID NO: 6403 - DNA, 470 bp, Cricetulus griseus; identical to SEQ ID NO: 2761
  misc_feature (280)..(280): n is a, c, g, or t

SEQ ID NO: 6404 - DNA, 600 bp, Cricetulus griseus; identical to SEQ ID NO: 2762
  misc_feature (108)..(146): n is a, c, g, or t

SEQ ID NO: 6405 - DNA, 581 bp, Cricetulus griseus; identical to SEQ ID NO: 2763
  misc_feature (61)..(87): n is a, c, g, or t

SEQ ID NO: 6406 - DNA, 447 bp, Cricetulus griseus
gccgcagctgtagatacagttaatgccacacccatgtcagggtcaaaagaatgagtttggaggagccaaagaagatgaccagagaggactggaggaaaaagaaggagctagaagaacagagaaaattgggcaatgcacctgcagaagttgatgaagagggaaaagacatcaaccctcatattcctcaatacatttcttcggttccgtggtacattgatccctcaaaaagacccacgttaaaacatcagagaccacagccagagaaacagaagcaattcagttcctctggggaatggtacaagagaggtgtgaaggagaattctataactaccaagtaccgcaaaggggcatgtgaaaattgtggggccatgacacacaaaaagaaagagtgctttgagcggccaaggcgggttggagctaaatttacaagcactaacatcgctccag

SEQ ID NO: 6407 - DNA, 259 bp, Cricetulus griseus; identical to SEQ ID NO: 2765

SEQ ID NO: 6408 - DNA, 255 bp, Cricetulus griseus
catgttttagaagccacctatggtattaacattataaagcctggagaagatgaagacccctaccgacctccaacctcagaagagctgttgacggcttatggatgcatgcgagggtgcatgacagcacatggacaaccagaccagcctcgatccgcacgttacatcctgaaggactatgtcaaagggaaactgttgtactgccacccccctcctggaagagatcctgtggcgttccagcatcaacaccaacaactt

SEQ ID NO: 6409 - DNA, 506 bp, Cricetulus griseus
tgaagcggttgggcaacactgatgggctgcccagggtgcagctgtcttctcctgggcagctcttcacagcactggagagagactcggtccagctgtgtacgtgggttggggaactcttcctggaactacacaatggcacctacactacccatgcccagctcaagaagaggaatcgggaatgtgagcaaatccttcatgacgtggagatgctgagcagcctggccctagcccgcagtgcccacttcctatacccagcagcccagttgcagcacctctggagactcctactcctcaaccagtttcatgatgtgttgactggaagctgcattcagctggtggcagaagatgccatgaactactatgaagacatccattcccatggcaatacgctgctcaatgctgcagccgcagccttatgtgctggggagccaggtcctaagggcctcctcgttatcaacacgctgccctggaagcgcactgaagtgttggcactgcccaagcctggt

SEQ ID NO: 6410 - DNA, 217 bp, Cricetulus griseus; identical to SEQ ID NO: 2768

SEQ ID NO: 6411 - DNA, 524 bp, Cricetulus griseus; identical to SEQ ID NO: 2769

SEQ ID NO: 6412 - DNA, 451 bp, Cricetulus griseus; identical to SEQ ID NO: 2770

SEQ ID NO: 6413 - DNA, 535 bp, Cricetulus griseus; identical to SEQ ID NO: 2771

SEQ ID NO: 6414 - DNA, 74 bp, Cricetulus griseus
ttctacaaactcttctaatcccaacattttcagcaaacgagcttatactattttatattttatttgaagccaca

SEQ ID NO: 6415 - DNA, 463 bp, Cricetulus griseus; identical to SEQ ID NO: 2773
  misc_feature (255)..(279): n is a, c, g, or t

SEQ ID NO: 6416 - DNA, 551 bp, Cricetulus griseus; identical to SEQ ID NO: 2774

SEQ ID NO: 6417 - DNA, 475 bp, Cricetulus griseus; identical to SEQ ID NO: 2775

SEQ ID NO: 6418 - DNA, 543 bp, Cricetulus griseus; identical to SEQ ID NO: 2776

SEQ ID NO: 6419 - DNA, 542 bp, Cricetulus griseus; identical to SEQ ID NO: 2777

SEQ ID NO: 6420 - DNA, 477 bp, Cricetulus griseus; identical to SEQ ID NO: 2778

SEQ ID NO: 6421 - DNA, 349 bp, Cricetulus griseus
accaccactgactggcttcttttcatcttttgaataaaacattacataagcctcattctgatgttcacactggctcctaaggactacacctttcttaactgtgtggaacttggggagggattatgggatacacagctgtccttcctgtaactttgggtgggaactaaaagttcaaatacaaaagacaagaattgtcaagagcaatgaatagaacagtgtgagtttattacaaaccttgtgatcacagctcatcatgtattccttattcctttcaggctttgaaccacaaacatattgggatcgaatgcaccttttccaggaagccattgcacacaggtttgtccattag

SEQ ID NO: 6422 - DNA, 500 bp, Cricetulus griseus; identical to SEQ ID NO: 2780

SEQ ID NO: 6423 - DNA, 528 bp, Cricetulus griseus; identical to SEQ ID NO: 2781

SEQ ID NO: 6424 - DNA, 491 bp, Cricetulus griseus; identical to SEQ ID NO: 2782

SEQ ID NO: 6425 - DNA, 299 bp, Cricetulus griseus
gtgttggttcagtttctagcagaccaagtactcccacactaggcacaccaactccacaaaccatgtctgtctcaactaaagtaggcactccaatgtccctcacaggacaaaggtttacagtacagatgcctgcttctcagtcccctgctgtgaaagcttcaattcccgcaacatcagcagttcagaatgttctgattaatccatcactaattgggtccaaaaacattcttattactactaatatggtatcccaaaatacagccaatgagtcagcaaatgccctgaaaagaaaacgtgaa

SEQ ID NO: 6426 - DNA, 552 bp, Cricetulus griseus; identical to SEQ ID NO: 2784

SEQ ID NO: 6427 - DNA, 418 bp, Cricetulus griseus; identical to SEQ ID NO: 2785

SEQ ID NO: 6428 - DNA, 457 bp, Cricetulus griseus; identical to SEQ ID NO: 2786
  misc_feature (152)..(170): n is a, c, g, or t
  misc_feature (273)..(298): n is a, c, g, or t

SEQ ID NO: 6429 - DNA, 522 bp, Cricetulus griseus; identical to SEQ ID NO: 2787
  misc_feature (255)..(298): n is a, c, g, or t

SEQ ID NO: 6430 - DNA, 497 bp, Cricetulus griseus; identical to SEQ ID NO: 2788

SEQ ID NO: 6431 - DNA, 467 bp, Cricetulus griseus; identical to SEQ ID NO: 2789

SEQ ID NO: 6432 - DNA, 424 bp, Cricetulus griseus; identical to SEQ ID NO: 2790

SEQ ID NO: 6433 - DNA, 351 bp, Cricetulus griseus; identical to SEQ ID NO: 2791

SEQ ID NO: 6434 - DNA, 417 bp, Cricetulus griseus
cttgatgctgttcccatcagaccactgaagaggacacttcccgttccctagtgaaagatcaccttttccagcaagagacagttgttaccagtgagccttatagaagctcagacataagacctttaccctttgaagatctgaatgccagaagagtctacttgcaaagcccagggaaccaggtaagaaaatgcatactattcatatgtatagcatatttagagaacctggtatgctacagaaaaacacaaagctctgtaaaagggcacagggatgtggaggatgagttttgtagacagggagggaatgtcttagttcagggtgttgtaatacaacatgaactgggtagctcaaacagcaggatttttgtttgtttgtgttatcctacagctctagcagttagactggctgtggtaaggg

SEQ ID NO: 6435 - DNA, 473 bp, Cricetulus griseus; identical to SEQ ID NO: 2793

SEQ ID NO: 6436 - DNA, 152 bp, Cricetulus griseus; identical to SEQ ID NO: 2794

SEQ ID NO: 6437 - DNA, 517 bp, Cricetulus griseus; identical to SEQ ID NO: 2795

SEQ ID NO: 6438 - DNA, 545 bp, Cricetulus griseus; identical to SEQ ID NO: 2796

SEQ ID NO: 6439 - DNA, 578 bp, Cricetulus griseus; identical to SEQ ID NO: 2797

SEQ ID NO: 6440 - DNA, 600 bp, Cricetulus griseus; identical to SEQ ID NO: 2798

SEQ ID NO: 6441 - DNA, 430 bp, Cricetulus griseus; identical to SEQ ID NO: 2799
  misc_feature (86)..(103): n is a, c, g, or t

SEQ ID NO: 6442 - DNA, 506 bp, Cricetulus griseus; identical to SEQ ID NO: 2800

SEQ ID NO: 6443 - DNA, 339 bp, Cricetulus griseus; identical to SEQ ID NO: 2801

SEQ ID NO: 6444 - DNA, 198 bp, Cricetulus griseus; identical to SEQ ID NO: 2802

SEQ ID NO: 6445 - DNA, 433 bp, Cricetulus griseus; identical to SEQ ID NO: 2803
  misc_feature (122)..(122): n is a, c, g, or t

SEQ ID NO: 6446 - DNA, 322 bp, Cricetulus griseus; identical to SEQ ID NO: 2804

SEQ ID NO: 6447 - DNA, 297 bp, Cricetulus griseus
aaggaaagaaagaattcggccttctttctcttctaatcttattccacggatctgattcaggccatgtcacaacacaaggctacataaaaacctcaagtggaggtcccagggtctgggggggtttaaatagggggtgatggaatgtttcggtaagggacccttttcttcaaatcctctcaaaggggaatttctaacagttccaacttaatgggctaacagctttgggggccttgcctctttcctaatctttagggcatgggagcccagcctccctaaccctaaaaccctgaaaatgga

SEQ ID NO: 6448 - DNA, 527 bp, Cricetulus griseus; identical to SEQ ID NO: 2806

SEQ ID NO: 6449 - DNA, 528 bp, Cricetulus griseus; identical to SEQ ID NO: 2807
  misc_feature (309)..(325): n is a, c, g, or t

SEQ ID NO: 6450 - DNA, 399 bp, Cricetulus griseus; identical to SEQ ID NO: 2808
  misc_feature (203)..(228): n is a, c, g, or t

SEQ ID NO: 6451 - DNA, 359 bp, Cricetulus griseus; identical to SEQ ID NO: 2809

SEQ ID NO: 6452 - DNA, 421 bp, Cricetulus griseus; identical to SEQ ID NO: 2810
  misc_feature (63)..(101): n is a, c, g, or t
  misc_feature (148)..(170): n is a, c, g, or t

SEQ ID NO: 6453 - DNA, 457 bp, Cricetulus griseus; identical to SEQ ID NO: 2811

SEQ ID NO: 6454 - DNA, 357 bp, Cricetulus griseus; identical to SEQ ID NO: 2812

SEQ ID NO: 6455 - DNA, 142 bp, Cricetulus griseus
gggacaccctgcagctggcgttcatcgacctcagacaagtaagatgtattgactccttccacttactgttctcttgccttattagtttatttttaatggtaccacaatgcttgtttgccctgaaaacccatctttggaagat

SEQ ID NO: 6456 - DNA, 323 bp, Cricetulus griseus; identical to SEQ ID NO: 2814

SEQ ID NO: 6457 - DNA, 528 bp, Cricetulus griseus; identical to SEQ ID NO: 2815

SEQ ID NO: 6458 - DNA, 291 bp, Cricetulus griseus; identical to SEQ ID NO: 2816

SEQ ID NO: 6459 - DNA, 355 bp, Cricetulus griseus; identical to SEQ ID NO: 2817

SEQ ID NO: 6460 - DNA, 294 bp, Cricetulus griseus; identical to SEQ ID NO: 2818

SEQ ID NO: 6461 - DNA, 495 bp, Cricetulus griseus; identical to SEQ ID NO: 2819

SEQ ID NO: 6462 - DNA, 360 bp, Cricetulus griseus; identical to SEQ ID NO: 2820
  misc_feature (58)..(73): n is a, c, g, or t
  misc_feature (75)..(88): n is a, c, g, or t

SEQ ID NO: 6463 - DNA, 313 bp, Cricetulus griseus; identical to SEQ ID NO: 2821

SEQ ID NO: 6464 - DNA, 578 bp, Cricetulus griseus; identical to SEQ ID NO: 2822
  misc_feature (468)..(494): n is a, c, g, or t

SEQ ID NO: 6465 - DNA, 579 bp, Cricetulus griseus; identical to SEQ ID NO: 2823

SEQ ID NO: 6466 - DNA, 600 bp, Cricetulus griseus; identical to SEQ ID NO: 2824

SEQ ID NO: 6467 - DNA, 581 bp, Cricetulus griseus; identical to SEQ ID NO: 2825

SEQ ID NO: 6468 - DNA, 581 bp, Cricetulus griseus; identical to SEQ ID NO: 2826

SEQ ID NO: 6469 - DNA, 567 bp, Cricetulus griseus; identical to SEQ ID NO: 2827

SEQ ID NO: 6470 - DNA, 579 bp, Cricetulus griseus; identical to SEQ ID NO: 2828
  misc_feature (292)..(306): n is a, c, g, or t

SEQ ID NO: 6471 - DNA, 510 bp, Cricetulus griseus; identical to SEQ ID NO: 2829

SEQ ID NO: 6472 - DNA, 569 bp, Cricetulus griseus; identical to SEQ ID NO: 2830

SEQ ID NO: 6473 - DNA, 422 bp, Cricetulus griseus; identical to SEQ ID NO: 2831

SEQ ID NO: 6474 - DNA, 580 bp, Cricetulus griseus; identical to SEQ ID NO: 2832

SEQ ID NO: 6475 - DNA, 580 bp, Cricetulus griseus; identical to SEQ ID NO: 2833

SEQ ID NO: 6476 - DNA, 579 bp, Cricetulus griseus; identical to SEQ ID NO: 2834

SEQ ID NO: 6477 - DNA, 580 bp, Cricetulus griseus; identical to SEQ ID NO: 2835
  misc_feature (442)..(460): n is a, c, g, or t

SEQ ID NO: 6478 - DNA, 579 bp, Cricetulus griseus; identical to SEQ ID NO: 2836

SEQ ID NO: 6479 - DNA, 96 bp, Cricetulus griseus
taccagtgttcttatatcactcaaggcaggcctggggcctgttagaccaaacacttcactacaggagactataggaaactttttaaggagagagat

SEQ ID NO: 6480 - DNA, 580 bp, Cricetulus griseus; identical to SEQ ID NO: 2838

SEQ ID NO: 6481 - DNA, 552 bp, Cricetulus griseus
  misc_feature (159)..(173): n is a, c, g, or t
tcttggctctgactggatggggttaccgggttatagctttgcagtatccagtttattgggaccatcttgaattctgtgatggattcagaaaacttttagaccacttacagttggataaagtccatctgtttggggcgtctttgggaggttttttggctnnnnnnnnnnnnnnntacactcacaagtctccaagagtccactccctcatcctctgcaatgccttcagtgacacatctatcttcaaccaaacgtggactgcaaacagcttttggctgatgccagcatttatgctcaagaaaatagttcttgggaacttttcctctggcccagtcgacccaatgatggcagatgccattgacttcatggtggacaggctagagagtttgggtcaaagtgaactggcttcaagactaactctgaattgtcaaaattcatatgtggaacctcataaaattcgggacatccctgtaaccatcatggatgtgtttgaccagagtgcattgtcaacggaagccaaggaagaaatgtacaaactgtaccctaatgcccgga

SEQ ID NO: 6482 - DNA, 579 bp, Cricetulus griseus; identical to SEQ ID NO: 2840

SEQ ID NO: 6483 - DNA, 567 bp, Cricetulus griseus; identical to SEQ ID NO: 2841
  misc_feature (65)..(82): n is a, c, g, or t

SEQ ID NO: 6484 - DNA, 579 bp, Cricetulus griseus; identical to SEQ ID NO: 2842

SEQ ID NO: 6485 - DNA, 175 bp, Cricetulus griseus; identical to SEQ ID NO: 2843

SEQ ID NO: 6486 - DNA, 418 bp, Cricetulus griseus; identical to SEQ ID NO: 2844

SEQ ID NO: 6487 - DNA, 188 bp, Cricetulus griseus; identical to SEQ ID NO: 2845

SEQ ID NO: 6488 - DNA, 368 bp, Cricetulus griseus; identical to SEQ ID NO: 2846
  misc_feature (193)..(193): n is a, c, g, or t
  misc_feature (198)..(198): n is a, c, g, or t

SEQ ID NO: 6489 - DNA, 486 bp, Cricetulus griseus; identical to SEQ ID NO: 2847

SEQ ID NO: 6490 - DNA, 579 bp, Cricetulus griseus; identical to SEQ ID NO: 2848

SEQ ID NO: 6491 - DNA, 401 bp, Cricetulus griseus
  misc_feature (276)..(302): n is a, c, g, or t
gccgccgcagaacctactcggacacagactcctctaatgatgttccccccgaagacccagagagacctcttcactgttcaggaaacacacttaatggagatttggcatcagcaaccattcctgaagaaagcagacttctggccaagacacaatctgaatctgaagaacctcttccatctttctcctgaggaaacggacacaccccgcctcctctgagtgttgctatgcaaaagctgctgtaattaaactctttctggggtagcttcccctctcctnnnnnnnnnnnnnnnnnnnnnnnnnnnttgtaaacaaacaacccacatacttttgaagtgtattttatctttctatagtttacttgcaagagtattttcctaataacttcacagtatggatgtgca

SEQ ID NO: 6492 - DNA, 579 bp, Cricetulus griseus; identical to SEQ ID NO: 2850

SEQ ID NO: 6493 - DNA, 579 bp, Cricetulus griseus; identical to SEQ ID NO: 2851

SEQ ID NO: 6494 - DNA, 463 bp, Cricetulus griseus; identical to SEQ ID NO: 2852
  misc_feature (50)..(62): n is a, c, g, or t
  misc_feature (65)..(79): n is a, c, g, or t

SEQ ID NO: 6495 - DNA, 579 bp, Cricetulus griseus; identical to SEQ ID NO: 2853
  misc_feature (232)..(246): n is a, c, g, or t

SEQ ID NO: 6496 - DNA, 570 bp, Cricetulus griseus; identical to SEQ ID NO: 2854

SEQ ID NO: 6497 - DNA, 578 bp, Cricetulus griseus; identical to SEQ ID NO: 2855
  misc_feature (26)..(26): n is a, c, g, or t

SEQ ID NO: 6498 - DNA, 303 bp, Cricetulus griseus; identical to SEQ ID NO: 2856

SEQ ID NO: 6499 - DNA, 577 bp, Cricetulus griseus; identical to SEQ ID NO: 2857

SEQ ID NO: 6500 - DNA, 300 bp, Cricetulus griseus; identical to SEQ ID NO: 2858
  misc_feature (150)..(150): n is a, c, g, or t

SEQ ID NO: 6501 - DNA, 578 bp, Cricetulus griseus; identical to SEQ ID NO: 2859

SEQ ID NO: 6502 - DNA, 580 bp, Cricetulus griseus; identical to SEQ ID NO: 2860
  misc_feature (339)..(356): n is a, c, g, or t
  misc_feature (387)..(404): n is a, c, g, or t

SEQ ID NO: 6503 - DNA, 580 bp, Cricetulus griseus; identical to SEQ ID NO: 2861

SEQ ID NO: 6504 - DNA, 578 bp, Cricetulus griseus; identical to SEQ ID NO: 2862

SEQ ID NO: 6505 - DNA, 201 bp, Cricetulus griseus; identical to SEQ ID NO: 2863

SEQ ID NO: 6506 - DNA, 138 bp, Cricetulus griseus; identical to SEQ ID NO: 2864

SEQ ID NO: 6507 - DNA, 577 bp, Cricetulus griseus; identical to SEQ ID NO: 2865

SEQ ID NO: 6508 - DNA, 578 bp, Cricetulus griseus; identical to SEQ ID NO: 2866
  misc_feature (512)..(512): n is a, c, g, or t

SEQ ID NO: 6509 - DNA, 283 bp, Cricetulus griseus; identical to SEQ ID NO: 2867
  misc_feature (62)..(79): n is a, c, g, or t

SEQ ID NO: 6510 - DNA, 579 bp, Cricetulus griseus; identical to SEQ ID NO: 2868

SEQ ID NO: 6511 - DNA, 580 bp, Cricetulus griseus; identical to SEQ ID NO: 2869
  misc_feature (270)..(321): n is a, c, g, or t
  misc_feature (381)..(381): n is a, c, g, or t
  misc_feature (488)..(488): n is a, c, g, or t

SEQ ID NO: 6512 - DNA, 567 bp, Cricetulus griseus
  misc_feature (76)..(76): n is a, c, g, or t
ttggatcccagcaacataaaaaggcttgacacttgaagggtcatagttccagtttgggactgggaatgtagctcanaagtgaagtgtgtgcttagcgtgtgtgaggccctcagttcaatcgctagcaccaattggccaattacatgtggaagtatgataagtaaactgacaaagggtttcttctcagctgatatgagaagaaaatggagtttatttggtaaggcaaggccatgtaccacattatatcagtttaatataatctagactgaagaattttaattaggtgaaatgttcactgtaactactaatagtgcaggaaatataattctgagagtttttctttacttttgcatttgatatgtttaaaacaaaactaaaattaaagcagtaagctaggtacagtggcaggtacctatagtctccgctatttatgaaactgaaatagaaagatcacttgcagcccagagttctgagcacagaaaacctcatttacaaacagataagcagtgctagagatacagcccagtgtcagtgctcacctagcacctagcatgggtttgattctca

SEQ ID NO: 6513 - DNA, 581 bp, Cricetulus griseus; identical to SEQ ID NO: 2871
  misc_feature (284)..(301): n is a, c, g, or t
  misc_feature (470)..(470): n is a, c, g, or t

SEQ ID NO: 6514 - DNA, 557 bp, Cricetulus griseus; identical to SEQ ID NO: 2872

SEQ ID NO: 6515 - DNA, 549 bp, Cricetulus griseus; identical to SEQ ID NO: 2873

SEQ ID NO: 6516 - DNA, 564 bp, Cricetulus griseus
  misc_feature (177)..(227): n is a, c, g, or t
gcgtgccatggtatatgtgaccctaaataaataaacctgggaggaacaagtattacattagatgatcacaaatcatcagtgagttctgcattttcaatctataagttcattctattgaaaaaagtgtggggtggagtcaaaatggtttagcaggtgaaggtactagctgctcagccnnnnnnnnnnnnnnnnnnnnnnnnnnnnnnnnnnnnnnnnnnnnnnnnnnnactccatgaattgtcctctgacctccaaacgcgtgccatggtatatgtgaccctaaataaataaacaaaagtgaaacacatgggaagtgctagagagatggttctgaagtcaaggacacatactcctttagagaggacctgagttcagttcccagcaccaacatcaggtgggctcacaaccacctgtagtaactctagctccaggaaatctgattcctctagccggcttgggcacctgtactcacatgtgcatagcccacccatgcacagacataattttttaaagtatttaaaaatatttttaaattgggtatggtagtgtacacttttaatccta

SEQ ID NO: 6517 - DNA, 577 bp, Cricetulus griseus
tccatgaggggtccaggtgaccctgagcctcagcttattgaaatggaggaggctgcatctccagcagcagttggagaggtcatgagggaaggtagtggagacagtgatgcagagagaagcagtgaatgtgaatttgcccagtataccacacatcatattctcaaatccttggcttccattgaagctcagtgcagtggtatgagctctgaaaagaaaaccgtgtttccctcttctgtggatagagtgaataccgccttgcagagagctcaaatgaaggtttgcagtctgtctggtcaacgagtagggcgtagcttaataaaatcaaaggatctgttgaaacaaaggtacttgcttgcaaaagctggctatcccctaagaaggtctcagtctttgccgaccaccttactgagcccagtaagggttgtgtcttctgtcaatgtacggctatctccaggaaaagagaccaggtgcagcccaccttccttcacctacaagtacacacctgaagaggaacaagaattggaaaagcaagtgactgaacaggatggtcagtctgtggttaaatctaccatcttca

SEQ ID NO: 6518 - DNA, 568 bp, Cricetulus griseus; identical to SEQ ID NO: 2876
  misc_feature (220)..(234): n is a, c, g, or t

SEQ ID NO: 6519 - DNA, 577 bp, Cricetulus griseus; identical to SEQ ID NO: 2877
  misc_feature (312)..(337): n is a, c, g, or t

SEQ ID NO: 6520 - DNA, 546 bp, Cricetulus griseus; identical to SEQ ID NO: 2878

SEQ ID NO: 6521 - DNA, 580 bp, Cricetulus griseus; identical to SEQ ID NO: 2879

SEQ ID NO: 6522 - DNA, 578 bp, Cricetulus griseus; identical to SEQ ID NO: 2880
  misc_feature (161)..(200): n is a, c, g, or t

SEQ ID NO: 6523 - DNA, 518 bp, Cricetulus griseus; identical to SEQ ID NO: 2881

SEQ ID NO: 6524 - DNA, 578 bp, Cricetulus griseus; identical to SEQ ID NO: 2882

SEQ ID NO: 6525 - DNA, 580 bp, Cricetulus griseus; identical to SEQ ID NO: 2883
  misc_feature (491)..(491): n is a, c, g, or t
  misc_feature (512)..(512): n is a, c, g, or t
  misc_feature (516)..(516): n is a, c, g, or t
  misc_feature (548)..(548): n is a, c, g, or t

SEQ ID NO: 6526 - DNA, 580 bp, Cricetulus griseus; identical to SEQ ID NO: 2884
  misc_feature (127)..(142): n is a, c, g, or t

SEQ ID NO: 6527 - DNA, 410 bp, Cricetulus griseus; identical to SEQ ID NO: 2885
  misc_feature (223)..(223): n is a, c, g, or t

SEQ ID NO: 6528 - DNA, 511 bp, Cricetulus griseus; identical to SEQ ID NO: 2886

SEQ ID NO: 6529 - DNA, 579 bp, Cricetulus griseus; identical to SEQ ID NO: 2887

SEQ ID NO: 6530 - DNA, 566 bp, Cricetulus griseus; identical to SEQ ID NO: 2888

SEQ ID NO: 6531 - DNA, 476 bp, Cricetulus griseus; identical to SEQ ID NO: 2889
  misc_feature (157)..(251): n is a, c, g, or t

SEQ ID NO: 6532 - DNA, 571 bp, Cricetulus griseus
aactccatatgtataccaaactagccttgaactcacttgctaggattaaaacatttaccaccacgcccagctctctgctctgtcctagaattcaagaaattgctttaacggtggggggcttaaaaagaaagccaagacagtgtgagtggacatactcacttctgggattcagagaacatttttaaaattcagatttttagcatgatacaaactaatgttctttcctctgagttgaaggagaaattaactatcaatctcttaaatccaaagctggataataagtaaaagaacctttccctttgttgggtataagacttctttctcctgctgtatcaagtgagaccattttgattggaagccatagcagctcagcaagtaaccagaatgctggcccaactccagacatgctgttttcctcaaatactaatgtgcagttgcaaaccttaatttctataatgtgttctaaaacgtgtggaccgagtagaccagctgcactacttttccttaaagcattcctagcacatggcccacagaccttggaagaaaaaaaattcctgtgtacagaccctgc

SEQ ID NO: 6533 - DNA, 191 bp, Cricetulus griseus; identical to SEQ ID NO: 2891

SEQ ID NO: 6534 - DNA, 567 bp, Cricetulus griseus; identical to SEQ ID NO: 2892
  misc_feature (208)..(236): n is a, c, g, or t
  misc_feature (259)..(278): n is a, c, g, or t

SEQ ID NO: 6535 - DNA, 579 bp, Cricetulus griseus; identical to SEQ ID NO: 2893
  misc_feature (354)..(354): n is a, c, g, or t

SEQ ID NO: 6536 - DNA, 579 bp, Cricetulus griseus; identical to SEQ ID NO: 2894
  misc_feature (421)..(437): n is a, c, g, or t

SEQ ID NO: 6537 - DNA, 544 bp, Cricetulus griseus
  misc_feature (100)..(128): n is a, c, g, or t
ttcccaggatggtcaaggcaaaggagatgatgtaattgtaattgacagtgatgatgaagatgacgatgaagaaaatgatggagaacatgaagattatgannnnnnnnnnnnnnnnnnnnnnnnnnnnngaagatgacacggggatgggagatgagggtgaagatagtaatgaaggaactggtagtgcagatggtaatgatggatatgaagctgatgatgctgagggtggtgatgggactgatccaggtacagaaacagaagaaagtatgggcggagctgaaagtaatcagagagctgctgattctcaaaacaatggcgaaggaagtacaagtgcagcagaatcatctttctctcaggaggttgctcgagaacagcagcccacatcagcatctgagagacagaccccacgagcaccccaatcaccaaggcgcccaccacatcctcttcccccacgcctgaccattcacgctccacctcaggagttgggaccaccagttcagagaattcagatgacccggaggcagtctgtagggcgtggacttca

SEQ ID NO: 6538 - DNA, 424 bp, Cricetulus griseus
tactattgcttatttttgaaagccagaagatgactttggagaactctggttcttccaccttgcttttgagacagagtctgttttagcttctatactgactaagccagctggcttgcgggtgttctgggtgtgtcttctttgtctgctgccccttccactgtggaattgcttaaattaagatagccactacatctggcattttttacttgttggttctggtgatccaactgatcagctgtgagtggcaaatcacttctatcaattgaatcattgaactagctgtcatattgtagtttttgtgtgtgtgacacagcctagattgaccagactcaggcaatgctttttccttagctattctagtgctgggattataggtggttctagattggaacccagagcctatactaactagtaaagtgttatt

SEQ ID NO: 6539 - DNA, 582 bp, Cricetulus griseus; identical to SEQ ID NO: 2897

SEQ ID NO: 6540 - DNA, 352 bp, Cricetulus griseus; identical to SEQ ID NO: 2898
  misc_feature (152)..(202): n is a, c, g, or t

SEQ ID NO: 6541 - DNA, 566 bp, Cricetulus griseus; identical to SEQ ID NO: 2899

SEQ ID NO: 6542 - DNA, 414 bp, Cricetulus griseus
  misc_feature (207)..(234): n is a, c, g, or t
gtgtgtgggatctgtgtgtcagagtgtatggtagcaggtaaattgagagcaaggagaagtggtgttggaaatttgaggtatttggtcctagtttattagatgtggggattgaggttttcagtatatggcttttgacttcagaagttgatcttgacttgaagtgttttgttgatttacaaatttgtttttactctttgacagatcttnnnnnnnnnnnnnnnnnnnnnnnnnnnncaagtcatttagttttggtaatcaagtctttatgagaacttagctcctcatatgcccatatggtattatctgtcttagtgctaggtaggaataaattattaatttttacttgtagcccccataatgagcaagatttagtgagggtatgacacttattgcatataattaacttgtaccagg

SEQ ID NO: 6543 - DNA, 557 bp, Cricetulus griseus
  misc_feature (28)..(46): n is a, c, g, or t
aaagtcacaagcatccatgaaagagatnnnnnnnnnnnnnnnnnnnggatgtgtgaaatttatcagtaagtgttaagtcacgagagagacttctcagcaaataaagctgcgatctatccatttgatgtgaagaggcaaactaaagtgtttaacttggtagacagaacaaacacctgccatacactcagaccttgggttccatccctagcaccccaaaacaaaatcaatatcttggcaacatttagcttctcctgaagtgagttattgccaatggaatgctttggaaatctccattatgttcataggaatgtgccccacacactgacaggagtgtgcaaattagcaacgcttacacagaaagcctgtgaagacactggtctgactcctacgacatgtccctgacccacaaataaaaggcgggaggaggtgctaatagattctttcaaccacttataaatctcctcaaaactatttctagtcaatcattaaaggcattttgtattgaaaaattgtgatagaaatatcaacaattaaagttagaaaagaggccaagaaaa

SEQ ID NO: 6544 - DNA, 578 bp, Cricetulus griseus; identical to SEQ ID NO: 2902

SEQ ID NO: 6545 - DNA, 488 bp, Cricetulus griseus; identical to SEQ ID NO: 2903

SEQ ID NO: 6546 - DNA, 493 bp, Cricetulus griseus
cctaatatatttttcagttcctgtttttggttgtttctgaacttgacctatgggtaacaggggaataatgtgtttagatttaaaagagagaccaagaaagctttcatttcctgctagtcactcttctagactggccttttcagtcatagcagtctgtctatacacaggtgtgtgtgtgtgtggatggtgtctgtgcccgaggagaaatcctgtcaatggagccagctgcgaattgacttttcctgtaaggtccctggattgcatgcagctggggtggttaagatcatatgtgttgattgtatagaatgtttttcaaagatcccttcagtatggattggtcctgcaatggaagtgtaactcaagagtcctggctcatacttgttctttggcattccacctcaacatgcatgtgtgtttcaataaagctttatcacttgagtgtttacactttgagttctgcatatgctttagtctttgatgccctgacttattg

SEQ ID NO: 6547 - DNA, 551 bp, Cricetulus griseus
  misc_feature (523)..(523): n is a, c, g, or t
tacatcaacttagagggaacaagaaggccagaaatacattttcaaagcatatagaacaactcaaacaggaacactataagaaaaaggaggagaagaatatataagtactttaccaagggcttttaatactctcttgcctgatctagaagagattgaacatttgaattggttggaagctttgaagttaatggaaaagagagcagatttccagttatgttttgtggtgctagaaaaaacaccttgggatgaaactgaccatatagacaaaattaatgatagacggatcccatttgacctcctgagcactttagaagcagaaaaggtctatcagaaccatgtacaacatctgatatcagagaaaagaagaatagaaatgaaggagaaattcaagaagactttagaaaaaattcagttcatctcacctgggcaaccatgggaggaagttatgtgttttgttatggaggatgaagcattcaaatacatcactgaggctgatagcaaagaagtatatggtaggcatcancgagagatagttgaaaaagccaaagaag

SEQ ID NO: 6548 - DNA, 578 bp, Cricetulus griseus; identical to SEQ ID NO: 2906

SEQ ID NO: 6549 - DNA, 450 bp, Cricetulus griseus; identical to SEQ ID NO: 2907
  misc_feature (406)..(406): n is a, c, g, or t

SEQ ID NO: 6550 - DNA, 579 bp, Cricetulus griseus; identical to SEQ ID NO: 2908

SEQ ID NO: 6551 - DNA, 81 bp, Cricetulus griseus; identical to SEQ ID NO: 2909
  misc_feature (28)..(28): n is a, c, g, or t

SEQ ID NO: 6552 - DNA, 579 bp, Cricetulus griseus; identical to SEQ ID NO: 2910

SEQ ID NO: 6553 - DNA, 578 bp, Cricetulus griseus; identical to SEQ ID NO: 2911
  misc_feature (422)..(442): n is a, c, g, or t

SEQ ID NO: 6554 - DNA, 535 bp, Cricetulus griseus; identical to SEQ ID NO: 2912
  misc_feature (126)..(126): n is a, c, g, or t

SEQ ID NO: 6555 - DNA, 458 bp, Cricetulus griseus; identical to SEQ ID NO: 2913
  misc_feature (29)..(53): n is a, c, g, or t
  misc_feature (78)..(95): n is a, c, g, or t

SEQ ID NO: 6556 - DNA, 374 bp, Cricetulus griseus
acgcccagctgatgccgctatttttaagagatacttttgtttattctgtagaagaatactcagattaacctattatgtaagaaaatccaaacacgcgtggtatttgctctaaatgatagaaatgctgtaaatcctgtgcagtctatccagttagcctgagtgtaaggtttttgctattagttttacgctgtggctgtcctaatggtctcctgccatcagtctttacattctttgctttcatctttgaagcctctgtacagaaggttttttttctatccatcccttgatcttacacccctaactactgctcaatcttcataatccatctttttgaaatttagcagatgtgtgctcctacttttcttcctcatttt

SEQ ID NO: 6557 - DNA, 580 bp, Cricetulus griseus; identical to SEQ ID NO: 2915
  misc_feature (141)..(161): n is a, c, g, or t
  misc_feature (164)..(176): n is a, c, g, or t
  misc_feature (253)..(271): n is a, c, g, or t
  misc_feature (401)..(418): n is a, c, g, or t

SEQ ID NO: 6558 - DNA, 579 bp, Cricetulus griseus; identical to SEQ ID NO: 2916

SEQ ID NO: 6559 - DNA, 579 bp, Cricetulus griseus; identical to SEQ ID NO: 2917
  misc_feature (286)..(337): n is a, c, g, or t
  misc_feature (339)..(352): n is a, c, g, or t
  misc_feature (384)..(403): n is a, c, g, or t
  misc_feature (406)..(439): n is a, c, g, or t

SEQ ID NO: 6560 - DNA, 490 bp, Cricetulus griseus; identical to SEQ ID NO: 2918
  misc_feature (217)..(233): n is a, c, g, or t

SEQ ID NO: 6561 - DNA, 578 bp, Cricetulus griseus; identical to SEQ ID NO: 2919

SEQ ID NO: 6562 - DNA, 459 bp, Cricetulus griseus; identical to SEQ ID NO: 2920

SEQ ID NO: 6563 - DNA, 529 bp, Cricetulus griseus; identical to SEQ ID NO: 2921

SEQ ID NO: 6564 - DNA, 572 bp, Cricetulus griseus; identical to SEQ ID NO: 2922

SEQ ID NO: 6565 - DNA, 572 bp, Cricetulus griseus
aaaaaaaatgttcattgtaaggtacattatcacaaaagaaactgaaaatatgtacacaaatataaaagttacagaaatattatctttattaagaagacataaataagttgctgggcagtgatgatgcatgaatttggcaggcagatctcagggagtttgaggcctgcctggtctatatagtgagttctaggatagccagggctacacagcaagaagataatgatgacaatgacaacaaaagctccaatctcacagggaggacagggtgagaacttaccatgaaataacatcctttcatttgcatggttgtggttttcttcagaaacttctttcctccggtgcgtgtatctttcccataattttttgttacaaaccttctgaatctaaacacaaaaaaaataaaagtcagcactaagtcaccactgaaatcccccagacatgctaaattttgtacagactttatcagactcaaaatacataaacaaggcagctggagagatggctcggtggttaagagcagtcactgcttttccagaggacctgggttcaattcccagcacccacatggcagc

SEQ ID NO: 6566 - DNA, 530 bp, Cricetulus griseus; identical to SEQ ID NO: 2924
  misc_feature (499)..(499): n is a, c, g, or t

SEQ ID NO: 6567 - DNA, 287 bp, Cricetulus griseus
  misc_feature (28)..(81): n is a, c, g, or t
  misc_feature (105)..(152): n is a, c, g, or t
tgccggctgctgcccgtgctggtgccannnnnnnnnnnnnnnnnnnnnnnnnnnnnnnnnnnnnnnnnnnnnnnnnnnnnnaagacctctttcttccaggctttnnnnnnnnnnnnnnnnnnnnnnnnnnnnnnnnnnnnnnnnnnnnnnnnatgtgcagctgataaaaactggagacaaagtaggagccagtgaagccacactgctgaacatgctcaacatctcccccttctcctttgggctgatcatccagcaagtgtttgacaatggcagcatttacaacccag

SEQ ID NO: 6568 - DNA, 557 bp, Cricetulus griseus; identical to SEQ ID NO: 2926

SEQ ID NO: 6569 - DNA, 494 bp, Cricetulus griseus
ggtgggacagaggtacaacgaagtgatggccacctatctgcttttaggctacaagagctttgagctggaaggtgacaccatcactttgaagccccggccttcagctgatttgaccaacagtagtgccccatctccatcccacaaggttcagcgcagtgtttctgccaaccctaagcagcgacgctccagcgaccaggccgtccctgccattcccacctcaaattcctactttaagaagacccagagtaacaatgcagaaaataagcggcctgaggatgaggcggggcggaaagccagcagcaccgccaaagtgcctgccagccctttgcctggggtagagaggaagaagaccactcctaccccctccacaaacaacgtcctttccaccagcacaaaccgaagcaggaactccccacttttggacagggctagccttggccagtcctctatccagaatggtaaagacagcacagccccccagggtgtccctgtcg

SEQ ID NO: 6570 - DNA, 522 bp, Cricetulus griseus; identical to SEQ ID NO: 2928

SEQ ID NO: 6571 - DNA, 502 bp, Cricetulus griseus; identical to SEQ ID NO: 2929

SEQ ID NO: 6572 - DNA, 567 bp, Cricetulus griseus; identical to SEQ ID NO: 2930

SEQ ID NO: 6573 - DNA, 438 bp, Cricetulus griseus; identical to SEQ ID NO: 2931
  misc_feature (382)..(382): n is a, c, g, or t

SEQ ID NO: 6574 - DNA, 519 bp, Cricetulus griseus; identical to SEQ ID NO: 2932

SEQ ID NO: 6575 - DNA, 540 bp, Cricetulus griseus; identical to SEQ ID NO: 2933

SEQ ID NO: 6576 - DNA, 578 bp, Cricetulus griseus; identical to SEQ ID NO: 2934

SEQ ID NO: 6577 - DNA, 574 bp, Cricetulus griseus; identical to SEQ ID NO: 2935

SEQ ID NO: 6578 - DNA, 499 bp, Cricetulus griseus; identical to SEQ ID NO: 2936

SEQ ID NO: 6579 - DNA, 500 bp, Cricetulus griseus; identical to SEQ ID NO: 2937
  misc_feature (348)..(378): n is a, c, g, or t

SEQ ID NO: 6580 - DNA, 278 bp, Cricetulus griseus
ctctcacatactgccttgaacagtgtgggagtgttctggagctgttaaaacaatatcagaattttaaaaacaacttgacagctttgattcaaaaagaagagggtatcatctcccagcaggcttcctacatgggaagggacaacctgaagaagaaggtagcagagattgaaactgtcaaagaagaattcaatgaacatttagaagttgtggacaagataaatcagatttgtaaaaatctacaatatcatctaaataaaatgaaaacctttgaagagccc

SEQ ID NO: 6581 - DNA, 479 bp, Cricetulus griseus; identical to SEQ ID NO: 2939

SEQ ID NO: 6582 - DNA, 502 bp, Cricetulus griseus; identical to SEQ ID NO: 2940

SEQ ID NO: 6583 - DNA, 539 bp, Cricetulus griseus; identical to SEQ ID NO: 2941

SEQ ID NO: 6584 - DNA, 501 bp, Cricetulus griseus; identical to SEQ ID NO: 2942

SEQ ID NO: 6585 - DNA, 395 bp, Cricetulus griseus; identical to SEQ ID NO: 2943

SEQ ID NO: 6586 - DNA, 234 bp, Cricetulus griseus
cgggggggaaccccagttttttttccctttaagaagggttaatttcccccctggggtaaaaaaggaaaataatgttttccgtggaaaattttttcaccctcaaatatcctttgggataggacctacctccccccactgtttctaagctgagggagtatccctctatgtgaaataagctcccaaagcccattcctatgctaagaataagtactgatctactacaagaagccctat

SEQ ID NO: 6587 - DNA, 247 bp, Cricetulus griseus; identical to SEQ ID NO: 2945

SEQ ID NO: 6588 - DNA, 487 bp, Cricetulus griseus; identical to SEQ ID NO: 2946

SEQ ID NO: 6589 - DNA, 579 bp, Cricetulus griseus; identical to SEQ ID NO: 2947
  misc_feature (434)..(456): n is a, c, g, or t

SEQ ID NO: 6590 - DNA, 517 bp, Cricetulus griseus; identical to SEQ ID NO: 2948

SEQ ID NO: 6591 - DNA, 146 bp, Cricetulus griseus; identical to SEQ ID NO: 2949

SEQ ID NO: 6592 - DNA, 540 bp, Cricetulus griseus
  misc_feature (229)..(247): n is a, c, g, or t
tagctcgcgcgtccgccgggatgagctacgaccgcgccatcaccgtcttctcgcccgacggccacctcttccaagtggagtacgcgcaggaggcggtcaagaagggctccactgcggttggtgttcgaggaaaggacattgttgttcttggtgtggaaaaaaaatcggtggccaagctacaagatgaaagaacagtacggaagatctgtgctttggacgataatgtctnnnnnnnnnnnnnnnnnnncactgccgatgcaaggatagtcatcaacagagcccgggtggagtgccagagccaccggctcaccgtggaggaccccgttactgtggagtacatcacccgatacattgccagtctgaagcagcgctatacacagagcaatgggcgcaggccatttggcatctctgccctcattgtgggatttgactttgatggcacccccagactctatcagactgacccctcatgcacataccatgcctggaaggccaatgccataggccggggcgccaagtcggtgcgtgaattcctggaga

SEQ ID NO: 6593 - DNA, 526 bp, Cricetulus griseus; identical to SEQ ID NO: 2951

SEQ ID NO: 6594 - DNA, 325 bp, Cricetulus griseus; identical to SEQ ID NO: 2952

SEQ ID NO: 6595 - DNA, 579 bp, Cricetulus griseus; identical to SEQ ID NO: 2953

SEQ ID NO: 6596 - DNA, 368 bp, Cricetulus griseus; identical to SEQ ID NO: 2954

SEQ ID NO: 6597 - DNA, 505 bp, Cricetulus griseus; identical to SEQ ID NO: 2955
  misc_feature (398)..(416): n is a, c, g, or t

SEQ ID NO: 6598 - DNA, 432 bp, Cricetulus griseus; identical to SEQ ID NO: 2956

SEQ ID NO: 6599 - DNA, 540 bp, Cricetulus griseus; identical to SEQ ID NO: 2957

SEQ ID NO: 6600 - DNA, 457 bp, Cricetulus griseus; identical to SEQ ID NO: 2958

SEQ ID NO: 6601 - DNA, 83 bp, Cricetulus griseus; identical to SEQ ID NO: 2959

SEQ ID NO: 6602 - DNA, 472 bp, Cricetulus griseus; identical to SEQ ID NO: 2960

SEQ ID NO: 6603 - DNA, 514 bp, Cricetulus griseus; identical to SEQ ID NO: 2961
  misc_feature (191)..(209): n is a, c, g, or t

SEQ ID NO: 6604 - DNA, 427 bp, Cricetulus griseus; identical to SEQ ID NO: 2962

SEQ ID NO: 6605 - DNA, 554 bp, Cricetulus griseus; identical to SEQ ID NO: 2963

SEQ ID NO: 6606 - DNA, 280 bp, Cricetulus griseus; identical to SEQ ID NO: 2964

SEQ ID NO: 6607 - DNA, 345 bp, Cricetulus griseus; identical to SEQ ID NO: 2965

SEQ ID NO: 6608 - DNA, 522 bp, Cricetulus griseus; identical to SEQ ID NO: 2966

SEQ ID NO: 6609 - DNA, 304 bp, Cricetulus griseus; identical to SEQ ID NO: 2967

SEQ ID NO: 6610 - DNA, 329 bp, Cricetulus griseus; identical to SEQ ID NO: 2968
  misc_feature (213)..(231): n is a, c, g, or t

SEQ ID NO: 6611 - DNA, 427 bp, Cricetulus griseus; identical to SEQ ID NO: 2969

SEQ ID NO: 6612 - DNA, 540 bp, Cricetulus griseus; identical to SEQ ID NO: 2970

SEQ ID NO: 6613 - DNA, 521 bp, Cricetulus griseus; identical to SEQ ID NO: 2971

SEQ ID NO: 6614 - DNA, 446 bp, Cricetulus griseus; identical to SEQ ID NO: 2972
  misc_feature (305)..(305): n is a, c, g, or t

SEQ ID NO: 6615 - DNA, 549 bp, Cricetulus griseus; identical to SEQ ID NO: 2973
  misc_feature (241)..(289): n is a, c, g, or t

SEQ ID NO: 6616 - DNA, 580 bp, Cricetulus griseus; identical to SEQ ID NO: 2974

SEQ ID NO: 6617 - DNA, 560 bp, Cricetulus griseus; identical to SEQ ID NO: 2975

SEQ ID NO: 6618 - DNA, 539 bp, Cricetulus griseus; identical to SEQ ID NO: 2976

SEQ ID NO: 6619 - DNA, 498 bp, Cricetulus griseus; identical to SEQ ID NO: 2977

SEQ ID NO: 6620 - DNA, 333 bp, Cricetulus griseus
cagagatctgcctttgcctctgagtgctgggattaaaggcatgcaccaccaacacctgcaggaaccattttaatttgggtaaattacaatgtttcttttttcttccagtgtgctgtaagaaaccataccagttcaaacttacagaaacttactcctatgtcttcattgaagagttttataattttatctcccatccataggcttgggcttgctttcaaaataattttatatatcttatttgtagccatatttcaagttattagttaaatataaataacagaacttagcatcttaaagtgtataggtcagtagtgttgagtgcattcacactgt

SEQ ID NO: 6621 - DNA, 219 bp, Cricetulus griseus
gacaggccactggaaacaggagagaggagaaaggaatgagggggagggagaggagggatcagagagaggcgggggggagagagaggatgggaggtgggcagaacccttttaaaagggaacatagtaaatgtgcacaggtggtgctcttagtggctgcagctcctgtcagaaccccaagggcagtccagtacagatgcctgaacactaacatcgagggct

SEQ ID NO: 6622 - DNA, 579 bp, Cricetulus griseus; identical to SEQ ID NO: 2980

SEQ ID NO: 6623 - DNA, 292 bp, Cricetulus griseus; identical to SEQ ID NO: 2981

SEQ ID NO: 6624 - DNA, 278 bp, Cricetulus griseus; identical to SEQ ID NO: 2982

SEQ ID NO: 6625 - DNA, 482 bp, Cricetulus griseus; identical to SEQ ID NO: 2983
  misc_feature (418)..(446): n is a, c, g, or t

SEQ ID NO: 6626 - DNA, 560 bp, Cricetulus griseus
cttcattatttgatgcaaaggagcggactgtcacctttataagtgggaagaagtacagtgtggatcacctgcactcaatgggagcaggggatctgctcagttctatgtttgagtttagtgagaagctgaacgctctccagctcagtgatgaggagatgagcttgttcacagcagttgttctggtatctgcagatcggtctggaattgaaaatgtcaactcggtggaagctttgcaagaaacgctcatccgtgcattaaggactttaatcatgaaaaaccacccaaatgaggcctccatttttacaaaattacttctaaagttgccagatcttcgatctttaaacaatatgcactctgaggagctcttggcctttaaagttcacccataaggccttggaacttgaactgatgcagctgtacattatgtgctaagatgcttatttatatgtgtataccatatgtggaattagaaaagaccttagacagtgccaggtcctgggctgtctctgtagtcagttaccagtagctgtttggatgagaactcattgccatgttagaca

SEQ ID NO: 6627 - DNA, 487 bp, Cricetulus griseus; identical to SEQ ID NO: 2985

SEQ ID NO: 6628 - DNA, 459 bp, Cricetulus griseus; identical to SEQ ID NO: 2986

SEQ ID NO: 6629 - DNA, 362 bp, Cricetulus griseus; identical to SEQ ID NO: 2987

SEQ ID NO: 6630 - DNA, 463 bp, Cricetulus griseus; identical to SEQ ID NO: 2988

SEQ ID NO: 6631 - DNA, 410 bp, Cricetulus griseus; identical to SEQ ID NO: 2989

SEQ ID NO: 6632 - DNA, 487 bp, Cricetulus griseus; identical to SEQ ID NO: 2990
  misc_feature (287)..(315): n is a, c, g, or t

SEQ ID NO: 6633 - DNA, 581 bp, Cricetulus griseus; identical to SEQ ID NO: 2991

SEQ ID NO: 6634 - DNA, 347 bp, Cricetulus griseus; identical to SEQ ID NO: 2992

SEQ ID NO: 6635 - DNA, 347 bp, Cricetulus griseus
gcgccacacgcttacgccccgcccctccggccgcaaagagagccttccgcggatgcgcgctgcggtgaggtgcgccgtggctggcaaaagggttctcctcctgtaggcggttaaagcgcttccgggcggaagaagaagatggagttgagggaaagatactggggtttgagacgcaggattcccggttgtggtgaggtagtttctggtcacaggagtagattccttcttggctgtgtgtgccagctttcatttgtgccacgtcaacgcagttctcgcattggtcccggctttactattatctcctatccatttttcgcgtcccccctctctctagagaagagagagag

SEQ ID NO: 6636 - DNA, 525 bp, Cricetulus griseus; identical to SEQ ID NO: 2994

SEQ ID NO: 6637 - DNA, 536 bp, Cricetulus griseus; identical to SEQ ID NO: 2995

SEQ ID NO: 6638 - DNA, 579 bp, Cricetulus griseus; identical to SEQ ID NO: 2996

SEQ ID NO: 6639 - DNA, 541 bp, Cricetulus griseus; identical to SEQ ID NO: 2997

SEQ ID NO: 6640 - DNA, 522 bp, Cricetulus griseus; identical to SEQ ID NO: 2998

SEQ ID NO: 6641 - DNA, 533 bp, Cricetulus griseus; identical to SEQ ID NO: 2999

SEQ ID NO: 6642 - DNA, 569 bp, Cricetulus griseus; identical to SEQ ID NO: 3000

SEQ ID NO: 6643 - DNA, 335 bp, Cricetulus griseus; identical to SEQ ID NO: 3001
  misc_feature (175)..(194): n is a, c, g, or t

SEQ ID NO: 6644 - DNA, 542 bp, Cricetulus griseus; identical to SEQ ID NO: 3002

SEQ ID NO: 6645 - DNA, 483 bp, Cricetulus griseus; identical to SEQ ID NO: 3003

SEQ ID NO: 6646 - DNA, 218 bp, Cricetulus griseus; identical to SEQ ID NO: 3004

SEQ ID NO: 6647 - DNA, 381 bp, Cricetulus griseus
  misc_feature (175)..(201): n is a, c, g, or t
  misc_feature (203)..(215): n is a, c, g, or t
  misc_feature (217)..(240): n is a, c, g, or t
taacatgtaaaaagacaagtatgatagtggctactgtaatcgaagccagcactaaggtgatggagatgggtaaatctatggagtttactggcaagtcagcttaacctacttggcaagctttgagccagtctctttttggtttggttttggtttttcaagacatgttttcagcacnnnnnnnnnnnnnnnnnnnnnnnnnnnannnnnnnnnnnnntnnnnnnnnnnnnnnnnnnnnnnnntgccaccaccacctggccagactgtctcaagcaaacaaggtagatggcatctaaggaacaccagctgaagttgacgcctggcttccacatgcacaagcagcatgcatgatgggacatgtgcgcacacacacatgaactcaa

SEQ ID NO: 6648 - DNA, 527 bp, Cricetulus griseus; identical to SEQ ID NO: 3006

SEQ ID NO: 6649 - DNA, 192 bp, Cricetulus griseus; identical to SEQ ID NO: 3007

SEQ ID NO: 6650 - DNA, 363 bp, Cricetulus griseus; identical to SEQ ID NO: 3008

SEQ ID NO: 6651 - DNA, 539 bp, Cricetulus griseus; identical to SEQ ID NO: 3009

SEQ ID NO: 6652 - DNA, 235 bp, Cricetulus griseus; identical to SEQ ID NO: 3010

SEQ ID NO: 6653 - DNA, 483 bp, Cricetulus griseus; identical to SEQ ID NO: 3011
  misc_feature (430)..(430): n is a, c, g, or t

SEQ ID NO: 6654 - DNA, 567 bp, Cricetulus griseus; identical to SEQ ID NO: 3012

SEQ ID NO: 6655 - DNA, 267 bp, Cricetulus griseus
aaaaaagtttgggttttccggaaccccctttggaaaataatgctaccccaaaattaaaaaaaataccctgcctttgctccggataagggggttaaacagtttggcccaccccccctggggccacccaggggcccaaggggggggccctgtctaaaaaaattaaatttttttattaaaacacaaccaaaaaagccacttggcccattgaaatagggcacatgcgggctgacccccaaaggggggggggcccttggaaaaaaaacccct

SEQ ID NO: 6656 - DNA, 457 bp, Cricetulus griseus; identical to SEQ ID NO: 3014
  misc_feature (351)..(351): n is a, c, g, or t

SEQ ID NO: 6657 - DNA, 497 bp, Cricetulus griseus; identical to SEQ ID NO: 3015

SEQ ID NO: 6658 - DNA, 401 bp, Cricetulus griseus; identical to SEQ ID NO: 3016

SEQ ID NO: 6659 - DNA, 471 bp, Cricetulus griseus; identical to SEQ ID NO: 3017

SEQ ID NO: 6660 - DNA, 137 bp, Cricetulus griseus; identical to SEQ ID NO: 3018

SEQ ID NO: 6661 - DNA, 445 bp, Cricetulus griseus; identical to SEQ ID NO: 3019

SEQ ID NO: 6662 - DNA, 501 bp, Cricetulus griseus; identical to SEQ ID NO: 3020

SEQ ID NO: 6663 - DNA, 167 bp, Cricetulus griseus; identical to SEQ ID NO: 3021

SEQ ID NO: 6664 - DNA, 445 bp, Cricetulus griseus; identical to SEQ ID NO: 3022

SEQ ID NO: 6665 - DNA, 550 bp, Cricetulus griseus; identical to SEQ ID NO: 3023

SEQ ID NO: 6666 - DNA, 540 bp, Cricetulus griseus; identical to SEQ ID NO: 3024

SEQ ID NO: 6667 - DNA, 406 bp, Cricetulus griseus; identical to SEQ ID NO: 3025

SEQ ID NO: 6668 - DNA, 463 bp, Cricetulus griseus; identical to SEQ ID NO: 3026

SEQ ID NO: 6669 - DNA, 343 bp, Cricetulus griseus; identical to SEQ ID NO: 3027
  misc_feature (50)..(68): n is a, c, g, or t
  misc_feature (79)..(101): n is a, c, g, or t

SEQ ID NO: 6670 - DNA, 513 bp, Cricetulus griseus; identical to SEQ ID NO: 3028

SEQ ID NO: 6671 - DNA, 326 bp, Cricetulus griseus; identical to SEQ ID NO: 3029

SEQ ID NO: 6672 - DNA, 487 bp, Cricetulus griseus; identical to SEQ ID NO: 3030

SEQ ID NO: 6673 - DNA, 438 bp, Cricetulus griseus; identical to SEQ ID NO: 3031

SEQ ID NO: 6674 - DNA, 467 bp, Cricetulus griseus; identical to SEQ ID NO: 3032
  misc_feature (285)..(313): n is a, c, g, or t

SEQ ID NO: 6675 - DNA, 413 bp, Cricetulus griseus; identical to SEQ ID NO: 3033

SEQ ID NO: 6676 - DNA, 392 bp, Cricetulus griseus; identical to SEQ ID NO: 3034

SEQ ID NO: 6677 - DNA, 307 bp, Cricetulus griseus; identical to SEQ ID NO: 3035
  misc_feature (258)..(278): n is a, c, g, or t

SEQ ID NO: 6678 - DNA, 582 bp, Cricetulus griseus; identical to SEQ ID NO: 3036
  misc_feature (390)..(427): n is a, c, g, or t

SEQ ID NO: 6679 - DNA, 383 bp, Cricetulus griseus; identical to SEQ ID NO: 3037

SEQ ID NO: 6680 - DNA, 304 bp, Cricetulus griseus; identical to SEQ ID NO: 3038
  misc_feature (90)..(103): n is a, c, g, or t
  misc_feature (105)..(120): n is a, c, g, or t

SEQ ID NO: 6681 - DNA, 434 bp, Cricetulus griseus; identical to SEQ ID NO: 3039
  misc_feature (68)..(94): n is a, c, g, or t

SEQ ID NO: 6682 - DNA, 196 bp, Cricetulus griseus
ctacacccccaacaatccaacagggtttggatattattttagcacacccagaagctgtgttaggtttagaacctacacagcatgggggtgggactccctgacaatggggatcacatcccccaaggaagccagtgaagggttagcctgcacatcagctgaataaaccctgagtaaacaataaataaattttccctga

SEQ ID NO: 6683 - DNA, 300 bp, Cricetulus griseus; identical to SEQ ID NO: 3041
  misc_feature (28)..(63): n is a, c, g, or t

SEQ ID NO: 6684 - DNA, 370 bp, Cricetulus griseus; identical to SEQ ID NO: 3042

SEQ ID NO: 6685 - DNA, 480 bp, Cricetulus griseus; identical to SEQ ID NO: 3043

SEQ ID NO: 6686 - DNA, 515 bp, Cricetulus griseus; identical to SEQ ID NO: 3044

SEQ ID NO: 6687 - DNA, 530 bp, Cricetulus griseus; identical to SEQ ID NO: 3045

SEQ ID NO: 6688 - DNA, 444 bp, Cricetulus griseus; identical to SEQ ID NO: 3046

SEQ ID NO: 6689 - DNA, 444 bp, Cricetulus griseus
accattttaacatcactgtcagcagtgctgcatgacaaaaaggaattccccaatccagagatgtttgacgctggtcaccttctagaaaagtgactactttatacccttctcaataggtaatagaaattcatctccattggcttctgtgacatgaagatctgtgaggaattacacagtgtctcccaagggactggtagacatgcatgtttcccagtgtccatgcactgtacttgatgatgagacttcttccctttgccacaaataaattaaactgcatgtggagtttctttggtgcctatcatcttctctgcagctcctttgatgcccatcatcttctctgaagtagattggtgctgtctctggctggaatcagtctctgtaaaaagagggtaaatggagaatgggtcatggtccagctccaaatgttcctgaatcagcggctgc

SEQ ID NO: 6690 - DNA, 494 bp, Cricetulus griseus; identical to SEQ ID NO: 3048

SEQ ID NO: 6691 - DNA, 363 bp, Cricetulus griseus; identical to SEQ ID NO: 3049

SEQ ID NO: 6692 - DNA, 190 bp, Cricetulus griseus; identical to SEQ ID NO: 3050

SEQ ID NO: 6693 - DNA, 338 bp, Cricetulus griseus
gatgcccgggatttcactgtttccgccatgcatggagatatggaccaaaaggaacgagatgtgatcatgagggagttccggtctggttctagcagagtattaattaccactgacctgttggccagaggcattgatgtgcagcaggtctccttagtgatcaattacgaccttcccaccaacagggaaaactacatccacagaattggtcgtggtggtcgctttggccgtaaaggtgtggctatcaatatggtgacagaagaagacaagaggactcttcgagacattgagacattctacaacacctgcattgaagagatgcccctcaatgttgctgacct

SEQ ID NO: 6694 - DNA, 548 bp, Cricetulus griseus; identical to SEQ ID NO: 3052

SEQ ID NO: 6695 - DNA, 489 bp, Cricetulus griseus; identical to SEQ ID NO: 3053

SEQ ID NO: 6696 - DNA, 579 bp, Cricetulus griseus; identical to SEQ ID NO: 3054
  misc_feature (155)..(184): n is a, c, g, or t

SEQ ID NO: 6697 - DNA, 370 bp, Cricetulus griseus; identical to SEQ ID NO: 3055
  misc_feature (252)..(278): n is a, c, g, or t

SEQ ID NO: 6698 - DNA, 287 bp, Cricetulus griseus; identical to SEQ ID NO: 3056

SEQ ID NO: 6699 - DNA, 577 bp, Cricetulus griseus; identical to SEQ ID NO: 3057
  misc_feature (50)..(97): n is a, c, g, or t

SEQ ID NO: 6700 - DNA, 568 bp, Cricetulus griseus; identical to SEQ ID NO: 3058

SEQ ID NO: 6701 - DNA, 183 bp, Cricetulus griseus; identical to SEQ ID NO: 3059

SEQ ID NO: 6702 - DNA, 183 bp, Cricetulus griseus; identical to SEQ ID NO: 3060

SEQ ID NO: 6703 - DNA, 465 bp, Cricetulus griseus; identical to SEQ ID NO: 3061

SEQ ID NO: 6704 - DNA, 428 bp, Cricetulus griseus; identical to SEQ ID NO: 3062

SEQ ID NO: 6705 - DNA, 580 bp, Cricetulus griseus; identical to SEQ ID NO: 3063
  misc_feature (475)..(495): n is a, c, g, or t

SEQ ID NO: 6706 - DNA, 542 bp, Cricetulus griseus; identical to SEQ ID NO: 3064
  misc_feature (210)..(239): n is a, c, g, or t
  misc_feature (297)..(439): n is a, c, g, or t

SEQ ID NO: 6707 - DNA, 254 bp, Cricetulus griseus
acaactcagaacaactgaacgggactcagcgggttctcctagacaacgtcctatcggaagagcagtgccacgagctacacagtgtggccagtggaatcatgctggttggtgatggataccgagggaaaacatcgccccatacaaccaatgaaaagtttgaaggagcaactgtcttgaaagcactaaaatttggctatgaaggccgagtgccactaaagagtgcacgcttgttctatgacatcagcgagaaagct

SEQ ID NO: 6708 - DNA, 329 bp, Cricetulus griseus; identical to SEQ ID NO: 3066

SEQ ID NO: 6709 - DNA, 567 bp, Cricetulus griseus; identical to SEQ ID NO: 3067

SEQ ID NO: 6710 - DNA, 486 bp, Cricetulus griseus; identical to SEQ ID NO: 3068

SEQ ID NO: 6711 - DNA, 479 bp, Cricetulus griseus; identical to SEQ ID NO: 3069

SEQ ID NO: 6712 - DNA, 480 bp, Cricetulus griseus; identical to SEQ ID NO: 3070

SEQ ID NO: 6713 - DNA, 495 bp, Cricetulus griseus; identical to SEQ ID NO: 3071

SEQ ID NO: 6714 - DNA, 481 bp, Cricetulus griseus; identical to SEQ ID NO: 3072

SEQ ID NO: 6715 - DNA, 423 bp, Cricetulus griseus; identical to SEQ ID NO: 3073

SEQ ID NO: 6716 - DNA, 226 bp, Cricetulus griseus; identical to SEQ ID NO: 3074

SEQ ID NO: 6717 - DNA, 477 bp, Cricetulus griseus; identical to SEQ ID NO: 3075

SEQ ID NO: 6718 - DNA, 600 bp, Cricetulus griseus; identical to SEQ ID NO: 3076

SEQ ID NO: 6719 - DNA, 573 bp, Cricetulus griseus; identical to SEQ ID NO: 3077

SEQ ID NO: 6720 - DNA, 508 bp, Cricetulus griseus; identical to SEQ ID NO: 3078
  misc_feature (248)..(272): n is a, c, g, or t

SEQ ID NO: 6721 - DNA, 537 bp, Cricetulus griseus; identical to SEQ ID NO: 3079

SEQ ID NO: 6722 - DNA, 487 bp, Cricetulus griseus; identical to SEQ ID NO: 3080

SEQ ID NO: 6723 - DNA, 283 bp, Cricetulus griseus; identical to SEQ ID NO: 3081

SEQ ID NO: 6724 - DNA, 481 bp, Cricetulus griseus; identical to SEQ ID NO: 3082

SEQ ID NO: 6725 - DNA, 479 bp, Cricetulus griseus; identical to SEQ ID NO: 3083

SEQ ID NO: 6726 - DNA, 479 bp, Cricetulus griseus; identical to SEQ ID NO: 3084

SEQ ID NO: 6727 - DNA, 570 bp, Cricetulus griseus; identical to SEQ ID NO: 3085

SEQ ID NO: 6728 - DNA, 156 bp, Cricetulus griseus; identical to SEQ ID NO: 3086

SEQ ID NO: 6729 - DNA, 463 bp, Cricetulus griseus; identical to SEQ ID NO: 3087

SEQ ID NO: 6730 - DNA, 495 bp, Cricetulus griseus; identical to SEQ ID NO: 3088

SEQ ID NO: 6731 - DNA, 551 bp, Cricetulus griseus; identical to SEQ ID NO: 3089

SEQ ID NO: 6732 - DNA, 318 bp, Cricetulus griseus; identical to SEQ ID NO: 3090

SEQ ID NO: 6733 - DNA, 428 bp, Cricetulus griseus; identical to SEQ ID NO: 3091
  misc_feature (228)..(243): n is a, c, g, or t

SEQ ID NO: 6734 - DNA, 103 bp, Cricetulus griseus; identical to SEQ ID NO: 3092

SEQ ID NO: 6735 - DNA, 502 bp, Cricetulus griseus; identical to SEQ ID NO: 3093

SEQ ID NO: 6736 - DNA, 531 bp, Cricetulus griseus; identical to SEQ ID NO: 3094

SEQ ID NO: 6737 - DNA, 493 bp, Cricetulus griseus; identical to SEQ ID NO: 3095

SEQ ID NO: 6738 - DNA, 156 bp, Cricetulus griseus; identical to SEQ ID NO: 3096

SEQ ID NO: 6739 - DNA, 523 bp, Cricetulus griseus
  misc_feature (332)..(368): n is a, c, g, or t
actggacgcgctcagatgtcggtgttcctcccagttcttgacccctggtcctgtctccagcccgtctcagcttacccactctgactcctttgagctgcttggaggggcagcttctggtagtagtggcttttatactttcacagaatcccttcatccagagatgtcttctggcaccagtgccctgcagcagcgagcacttccagtgccctcactgcctactgtcgtttagtcactgactgctttctggtttgaaggatgcagtggttcctccttccttgaaccctttctgcgtacgtgtcaccctgctgaaccatgcagcctcaccagagcgnnnnnnnnnnnnnnnnnnnnnnnnnnnnnnnnnnnnnttacagtgaggaatgctattacataaggcactttaagtcagtgacagctccaaatttgcacttcatctgttgactagtaaactgtacccagaacaggagcttgtggacacccctggatggtattgcagcttcaggggcaggcacttctgtcacgg

SEQ ID NO: 6740 - DNA, 578 bp, Cricetulus griseus; identical to SEQ ID NO: 3098

SEQ ID NO: 6741 - DNA, 579 bp, Cricetulus griseus; identical to SEQ ID NO: 3099
  misc_feature (75)..(75): n is a, c, g, or t
  misc_feature (493)..(507): n is a, c, g, or t

SEQ ID NO: 6742 - DNA, 446 bp, Cricetulus griseus; identical to SEQ ID NO: 3100

SEQ ID NO: 6743 - DNA, 508 bp, Cricetulus griseus; identical to SEQ ID NO: 3101

SEQ ID NO: 6744 - DNA, 220 bp, Cricetulus griseus; identical to SEQ ID NO: 3102

SEQ ID NO: 6745 - DNA, 550 bp, Cricetulus griseus; identical to SEQ ID NO: 3103

SEQ ID NO: 6746 - DNA, 431 bp, Cricetulus griseus; identical to SEQ ID NO: 3104

SEQ ID NO: 6747 - DNA, 300 bp, Cricetulus griseus; identical to SEQ ID NO: 3105

SEQ ID NO: 6748 - DNA, 504 bp, Cricetulus griseus; identical to SEQ ID NO: 3106

SEQ ID NO: 6749 - DNA, 431 bp, Cricetulus griseus; identical to SEQ ID NO: 3107
  misc_feature (69)..(89): n is a, c, g, or t

SEQ ID NO: 6750 - DNA, 446 bp, Cricetulus griseus; identical to SEQ ID NO: 3108
  misc_feature (49)..(72): n is a, c, g, or t
  misc_feature (137)..(170): n is a, c, g, or t

SEQ ID NO: 6751 - DNA, 335 bp, Cricetulus griseus; identical to SEQ ID NO: 3109

SEQ ID NO: 6752 - DNA, 197 bp, Cricetulus griseus; identical to SEQ ID NO: 3110

SEQ ID NO: 6753 - DNA, 449 bp, Cricetulus griseus; identical to SEQ ID NO: 3111
  misc_feature (83)..(105): n is a, c, g, or t

SEQ ID NO: 6754 - DNA, 578 bp, Cricetulus griseus; identical to SEQ ID NO: 3112

SEQ ID NO: 6755 - DNA, 485 bp, Cricetulus griseus; identical to SEQ ID NO: 3113

SEQ ID NO: 6756 - DNA, 366 bp, Cricetulus griseus; identical to SEQ ID NO: 3114

SEQ ID NO: 6757 - DNA, 290 bp, Cricetulus griseus; identical to SEQ ID NO: 3115

SEQ ID NO: 6758 - DNA, 259 bp, Cricetulus griseus; identical to SEQ ID NO: 3116

SEQ ID NO: 6759 - DNA, 508 bp, Cricetulus griseus; identical to SEQ ID NO: 3117
  misc_feature (462)..(476): n is a, c, g, or t

SEQ ID NO: 6760 - DNA, 448 bp, Cricetulus griseus; identical to SEQ ID NO: 3118

SEQ ID NO: 6761 - DNA, 321 bp, Cricetulus griseus; identical to SEQ ID NO: 3119

SEQ ID NO: 6762 - DNA, 365 bp, Cricetulus griseus; identical to SEQ ID NO: 3120

SEQ ID NO: 6763 - DNA, 456 bp, Cricetulus griseus; identical to SEQ ID NO: 3121
  misc_feature (41)..(58): n is a, c, g, or t

SEQ ID NO: 6764 - DNA, 341 bp, Cricetulus griseus; identical to SEQ ID NO: 3122

SEQ ID NO: 6765 - DNA, 93 bp, Cricetulus griseus; identical to SEQ ID NO: 3123

SEQ ID NO: 6766 - DNA, 292 bp, Cricetulus griseus; identical to SEQ ID NO: 3124

SEQ ID NO: 6767 - DNA, 100 bp, Cricetulus griseus; identical to SEQ ID NO: 3125

SEQ ID NO: 6768 - DNA, 82 bp, Cricetulus griseus
ctttttcgctcttatatcaaaaccacgattcccaccactaattattataaacgagaacaacaaaatactcatgaacccaatt

SEQ ID NO: 6769 - DNA, 221 bp, Cricetulus griseus; identical to SEQ ID NO: 3127

SEQ ID NO: 6770 - DNA, 431 bp, Cricetulus griseus; identical to SEQ ID NO: 3128
  misc_feature (263)..(280): n is a, c, g, or t

SEQ ID NO: 6771 - DNA, 442 bp, Cricetulus griseus; identical to SEQ ID NO: 3129
  misc_feature (89)..(108): n is a, c, g, or t

SEQ ID NO: 6772 - DNA, 292 bp, Cricetulus griseus; identical to SEQ ID NO: 3130
  misc_feature (153)..(153): n is a, c, g, or t

SEQ ID NO: 6773 - DNA, 341 bp, Cricetulus griseus; identical to SEQ ID NO: 3131

SEQ ID NO: 6774 - DNA, 201 bp, Cricetulus griseus; identical to SEQ ID NO: 3132

SEQ ID NO: 6775 - DNA, 90 bp, Cricetulus griseus; identical to SEQ ID NO: 3133

SEQ ID NO: 6776 - DNA, 516 bp, Cricetulus griseus; identical to SEQ ID NO: 3134
  misc_feature (192)..(211): n is a, c, g, or t
  misc_feature (221)..(238): n is a, c, g, or t

SEQ ID NO: 6777 - DNA, 260 bp, Cricetulus griseus; identical to SEQ ID NO: 3135
  misc_feature (204)..(204): n is a, c, g, or t

SEQ ID NO: 6778 - DNA, 105 bp, Cricetulus griseus; identical to SEQ ID NO: 3136

SEQ ID NO: 6779 - DNA, 207 bp, Cricetulus griseus; identical to SEQ ID NO: 3137

SEQ ID NO: 6780 - DNA, 220 bp, Cricetulus griseus; identical to SEQ ID NO: 3138

SEQ ID NO: 6781 - DNA, 229 bp, Cricetulus griseus; identical to SEQ ID NO: 3139
  misc_feature (149)..(149): n is a, c, g, or t

SEQ ID NO: 6782 - DNA, 406 bp, Cricetulus griseus; identical to SEQ ID NO: 3140

SEQ ID NO: 6783 - DNA, 343 bp, Cricetulus griseus; identical to SEQ ID NO: 3141
  misc_feature (195)..(195): n is a, c, g, or t

SEQ ID NO: 6784 - DNA, 457 bp, Cricetulus griseus; identical to SEQ ID NO: 3142
  misc_feature (78)..(95): n is a, c, g, or t
  misc_feature (160)..(160): n is a, c, g, or t

SEQ ID NO: 6785 - DNA, 455 bp, Cricetulus griseus; identical to SEQ ID NO: 3143
  misc_feature (386)..(400): n is a, c, g, or t

SEQ ID NO: 6786 - DNA, 371 bp, Cricetulus griseus; identical to SEQ ID NO: 3144

SEQ ID NO: 6787 - DNA, 107 bp, Cricetulus griseus; identical to SEQ ID NO: 3145

SEQ ID NO: 6788 - DNA, 343 bp, Cricetulus griseus; identical to SEQ ID NO: 3146

SEQ ID NO: 6789 - DNA, 552 bp, Cricetulus griseus; identical to SEQ ID NO: 3147

SEQ ID NO: 6790 - DNA, 302 bp, Cricetulus griseus; identical to SEQ ID NO: 3148

SEQ ID NO: 6791 - DNA, 221 bp, Cricetulus griseus
gataacaaaaaatgttgttttaactcttacctgagctgacttgctcaggttttatcttatttctaaatagataaaattaaaaaggtaagtaaactaagctaagcattaagcatactgttttaatagctatatactaggtagctaattgctcttgggtttctttagaataaagcatgaagggaaacaatggcttctcatggcattgctcaatgttttgtgtt

SEQ ID NO: 6792 - DNA, 358 bp, Cricetulus griseus; identical to SEQ ID NO: 3150

SEQ ID NO: 6793 - DNA, 522 bp, Cricetulus griseus; identical to SEQ ID NO: 3151

SEQ ID NO: 6794 - DNA, 510 bp, Cricetulus griseus; identical to SEQ ID NO: 3152

SEQ ID NO: 6795 - DNA, 259 bp, Cricetulus griseus; identical to SEQ ID NO: 3153

SEQ ID NO: 6796 - DNA, 141 bp, Cricetulus griseus; identical to SEQ ID NO: 3154

SEQ ID NO: 6797 - DNA, 472 bp, Cricetulus griseus; identical to SEQ ID NO: 3155

SEQ ID NO: 6798 - DNA, 579 bp, Cricetulus griseus; identical to SEQ ID NO: 3156

SEQ ID NO: 6799 - DNA, 385 bp, Cricetulus griseus; identical to SEQ ID NO: 3157

SEQ ID NO: 6800 - DNA, 263 bp, Cricetulus griseus; identical to SEQ ID NO: 3158

SEQ ID NO: 6801 - DNA, 501 bp, Cricetulus griseus; identical to SEQ ID NO: 3159
  misc_feature (363)..(382): n is a, c, g, or t

SEQ ID NO: 6802 - DNA, 404 bp, Cricetulus griseus; identical to SEQ ID NO: 3160

SEQ ID NO: 6803 - DNA, 151 bp, Cricetulus griseus
tcacccgcgccgctcctcgcctctcttgttagcccgagactcgcctctcagccgcccgccgcacagacgcacgagtagacagtgcagctccatcggctgatcctcgctgagctccgagggtaggcggtaccgggcggcccacgatgccgaa

SEQ ID NO: 6804 - DNA, 544 bp, Cricetulus griseus; identical to SEQ ID NO: 3162

SEQ ID NO: 6805 - DNA, 471 bp, Cricetulus griseus; identical to SEQ ID NO: 3163
  misc_feature (330)..(330): n is a, c, g, or t

SEQ ID NO: 6806 - DNA, 493 bp, Cricetulus griseus; identical to SEQ ID NO: 3164

SEQ ID NO: 6807 - DNA, 382 bp, Cricetulus griseus; identical to SEQ ID NO: 3165

SEQ ID NO: 6808 - DNA, 335 bp, Cricetulus griseus; identical to SEQ ID NO: 3166
  misc_feature (143)..(143): n is a, c, g, or t

SEQ ID NO: 6809 - DNA, 421 bp, Cricetulus griseus; identical to SEQ ID NO: 3167

SEQ ID NO: 6810 - DNA, 391 bp, Cricetulus griseus; identical to SEQ ID NO: 3168
  misc_feature (85)..(109): n is a, c, g, or t

SEQ ID NO: 6811 - DNA, 417 bp, Cricetulus griseus; identical to SEQ ID NO: 3169

SEQ ID NO: 6812 - DNA, 92 bp, Cricetulus griseus; identical to SEQ ID NO: 3170

SEQ ID NO: 6813 - DNA, 491 bp, Cricetulus griseus; identical to SEQ ID NO: 3171
  misc_feature (158)..(172): n is a, c, g, or t

SEQ ID NO: 6814 - DNA, 315 bp, Cricetulus griseus
gattatgcctctataaatacctgtgaagaaagagtacagtccaaaatttattagccctgcctttctatggggaaagccaaggttgttggctgatacctctaatcccaaccactgagacccaagggccaggcgggggttatgggaaaatccatatcttcctgggctacagaatgaaaatctcaaaacaaaacaaaatgaattatcttttattccaaaaagagattcgcaatttgcaattcaaatatcttttttaaaaagttagtaatgtagagcagggtgtagtggtacatgcctttaatcccaccacttgggagg

SEQ ID NO: 6815 - DNA, 506 bp, Cricetulus griseus; identical to SEQ ID NO: 3173

SEQ ID NO: 6816 - DNA, 347 bp, Cricetulus griseus; identical to SEQ ID NO: 3174

SEQ ID NO: 6817 - DNA, 489 bp, Cricetulus griseus; identical to SEQ ID NO: 3175

SEQ ID NO: 6818 - DNA, 182 bp, Cricetulus griseus; identical to SEQ ID NO: 3176

SEQ ID NO: 6819 - DNA, 437 bp, Cricetulus griseus; identical to SEQ ID NO: 3177

SEQ ID NO: 6820 - DNA, 362 bp, Cricetulus griseus; identical to SEQ ID NO: 3178

SEQ ID NO: 6821 - DNA, 329 bp, Cricetulus griseus; identical to SEQ ID NO: 3179
  misc_feature (194)..(214): n is a, c, g, or t

SEQ ID NO: 6822 - DNA, 578 bp, Cricetulus griseus; identical to SEQ ID NO: 3180
  misc_feature (198)..(198): n is a, c, g, or t
  misc_feature (543)..(543): n is a, c, g, or t

SEQ ID NO: 6823 - DNA, 553 bp, Cricetulus griseus; identical to SEQ ID NO: 3181
  misc_feature (273)..(273): n is a, c, g, or t

SEQ ID NO: 6824 - DNA, 374 bp, Cricetulus griseus; identical to SEQ ID NO: 3182

SEQ ID NO: 6825 - DNA, 436 bp, Cricetulus griseus; identical to SEQ ID NO: 3183
  misc_feature (269)..(321): n is a, c, g, or t

SEQ ID NO: 6826 - DNA, 481 bp, Cricetulus griseus; identical to SEQ ID NO: 3184
  misc_feature (403)..(403): n is a, c, g, or t
  misc_feature (445)..(445): n is a, c, g, or t

SEQ ID NO: 6827 - DNA, 507 bp, Cricetulus griseus; identical to SEQ ID NO: 3185

SEQ ID NO: 6828 - DNA, 484 bp, Cricetulus griseus; identical to SEQ ID NO: 3186

SEQ ID NO: 6829 - DNA, 306 bp, Cricetulus griseus; identical to SEQ ID NO: 3187

SEQ ID NO: 6830 - DNA, 482 bp, Cricetulus griseus; identical to SEQ ID NO: 3188

SEQ ID NO: 6831 - DNA, 430 bp, Cricetulus griseus; identical to SEQ ID NO: 3189

SEQ ID NO: 6832 - DNA, 446 bp, Cricetulus griseus; identical to SEQ ID NO: 3190
  misc_feature (323)..(359): n is a, c, g, or t

SEQ ID NO: 6833 - DNA, 369 bp, Cricetulus griseus; identical to SEQ ID NO: 3191
  misc_feature (123)..(137): n is a, c, g, or t

SEQ ID NO: 6834 - DNA, 84 bp, Cricetulus griseus; identical to SEQ ID NO: 3192

SEQ ID NO: 6835 - DNA, 515 bp, Cricetulus griseus; identical to SEQ ID NO: 3193

SEQ ID NO: 6836 - DNA, 366 bp, Cricetulus griseus; identical to SEQ ID NO: 3194

SEQ ID NO: 6837 - DNA, 332 bp, Cricetulus griseus; identical to SEQ ID NO: 3195

SEQ ID NO: 6838 - DNA, 436 bp, Cricetulus griseus; identical to SEQ ID NO: 3196

SEQ ID NO: 6839 - DNA, 540 bp, Cricetulus griseus
  misc_feature (41)..(56): n is a, c, g, or t
aagaggatgacgttgtgaagctcaagaatcacgaccctcannnnnnnnnnnnnnnnccacctgacactccggaaatcccagataaccactttttggataatctttgcatcttttgtggggagaggaatgagtccttcacagaagagggcctggacctccactactggaagcactgcctcatgctgacgagatgcgaccactgcaggcaggtggttgagatatccagcctgacagaacacctgctgacagaatgtgacaaaagggatgggtttgggaagtgccaccgctgcaaggaggctgatgacaaggaggagcttcccaagctcctcaaaaccaaggagtgcaaccctgccaaatcggagaaggtggcaaaccgatgtcctctatgtcatgagaactttgcccctggagaagaggcatggaaggttcatctgatggactctactggctgcacaatgaacctgcgaaagacacatgttctttacaaagccaccgccccacagcaagggaagggcccagcagcattgaagtcaagcacct

SEQ ID NO: 6840 - DNA, 600 bp, Cricetulus griseus
aacttaaaggaatggcttcgtggaaacaaaaatatgaacctctaggactggatgctacaggcattgaagacgccattactgctgtgggctctttcatcctcaaggcaaacgaacttctccaagttatagatagtagtatgaaaaacttcaaggcattttttcggtggctatatgtagcaatgctgagaatgacagaagaccatgtgcttcctgagctgaacaagatgactcagaaggatataacatttgttgctgaatttctcactgaacatttcaatgaggctccagacctttataatcggaaaggaaaatactttaatgttgaaagagttggtcagtatttggaagaagaagaccaccaccttgtgtgacccccttaccccaaaaggaacccagtggttgacttcttccaaaacagcagccacctgaaagaaaggcctttgctgtttccttattaccctcgaaaatcattgcattttgtgaaaaggcgaatggagaacattattgatcagtgttggcaaaagccgggcaatgtatttggaagatcgatgaatcaggcaatttgcatttcattatatagagatgctaggagtatggact

SEQ ID NO: 6841 - DNA, 547 bp, Cricetulus griseus
  misc_feature (87)..(106): n is a, c, g, or t
ggtacgtgaataatagccacctagaagtgaattttaaccttaaaatacctattccagaaagtaaattaatgtattcaaactcagggnnnnnnnnnnnnnnnnnnnntgaggctttaaaaaccttagtcaaacaaagaaaaaactcggggttccaggagatctggcttgtgcaggcaccaggcatgcactaaatgcacagttctcatagaaaagtaaatcaaagagaccagtgagtatgagcatccatagtggattctttttaactctttgtaggactgttataattaaaagttgtttaagccagccatggtggcacaaatttttaattaacacattcaggcatcagatacaggttgacttctgagtttgaggccagcctgctacagagtaagttccagaatagccagggctatccagagaaaccctatcaaaaaatgaagaaaaataaaacctgtttaaactacttgatagtttagaaacaaaagccctccttagttaattctataaagccagagcaaacttttccacaccctgcaaaatccatcag

SEQ ID NO: 6842 - DNA, 568 bp, Cricetulus griseus
  misc_feature (442)..(461): n is a, c, g, or t
  misc_feature (548)..(568): n is a, c, g, or t
ctgatggattttgcagggtgtggaaaagtttgctctggctttatagaattaactaaggagggcttttgtttctaaactatcaagtagtttaaacaggttttatttttcttcattttttgatagggtttctctggatagccctggctattctggaacttactctgtagcaggctggcctcaaactcagaagtcaacctgtatctgatgcctgaatgtgttaattaaaaatttgtgccaccatggctggcttaaacaacttttaattataacagtcctacaaagagttaaaaagaatccactatggatgctcatactcactggtctctttgatttacttttctatgagaactgtgcatttagtgcatgcctggtgcctgcacaagccagatctcctggaaccccgagttttttctttgtttgactaaggtttttaaagcctcannnnnnnnnnnnnnnnnnnnccctgagtttgaatacattaatttactttctggaataggtattttaaggttaaaattcacttctaggtggctattattcacgtaccnnnnnnnnnnnnnnnnnnnnn

SEQ ID NO: 6843 - DNA, 610 bp, Cricetulus griseus
aatgaagaccctcaaaataaaaaagagatctgaggatgaggttcagtggtcgttactatgcacaaggccataggttcaagccccagtactttttaaaagcaacatctgacatttagaatagcatattataagacatagtcctaaccgagatagttgtatttgaattaaccctggagaccactctagtggttatttttcctttattttggctcacaatttcagagcggtttcaatacatcatggcaggaaaggcaaaacaactccaactctggctgtgagatgggagcctgaagaagagcagctgctcacaacacaggaagcaatgagaagagtgagcctgtccctggtagtctgcttctcaccagccagccccttccataggccggacagccttcacaatagggcacagactggggaccaagtattcaccacataatcctgtagtggacatttcagattcaaaccctaacagtaactgtagaagagaaagttaaaaagctgttcgttcacaagaagtgatctgtaaccctttactgtgtcctcatgctgtgagctgagagttggagtttattgcctgaaggagactgaataaaaacttgatgagagaaga

SEQ ID NO: 6844 - DNA, 600 bp, Cricetulus griseus
  misc_feature (31)..(59): n is a, c, g, or t
  misc_feature (200)..(230): n is a, c, g, or t
  misc_feature (449)..(485): n is a, c, g, or t
tattgagggttaattgctcgctagacgcccnnnnnnnnnnnnnnnnnnnnnnnnnnnnncgggtatccgctcaattttcccccccaaataaaaaaaaaaccccccattttaaaaacccccttttaaatttttttaaaaaaacccccccctttaaaaaaggggggaaaaaccaaaaaaccctttttaaaaaaccccccccnnnnnnnnnnnnnnnnnnnnnnnnnnnnnnnccaaaaaggcccaaatgttcccccaaccgggttaaggaaaaaaaacctcctaaaaaagggggttttttaaaaaaaaaccccttggggggggacacctggtttttatttggaaagggaaccccctttccttggtgggggtttaaaaggggcccaccccccgggggggaaaaaacccccctttttttttttggggcgcctttttaaaaaaaagggggcccnnnnnnnnnnnnnnnnnnnnnnnnnnnnnnnnnnnnnttctgcacccccccttttttaaaaaaagggggaaaggggttttccccccgggtttttttatatattttttttgggcccccgggaaaaaaattatattggggcccgttgtttataa

SEQ ID NO: 6845 - DNA, 600 bp, Cricetulus griseus
tcgtaaactgggatttgtggtattgtgtggtagactgccacctcagctaatctatggagttagtgcttgcttaacagcataacccaaaggaaggtcccaacaggatcccacaccagacctgtctctggctgattttcaggatacttcacacttgtcccttcggtagctccagcctagagatcatcaacttgtgagccaccagatggctggctctattcagtgtgcccttctcaacattcctagggatattctggatggttagacgattctctctgactgattggtctgtgatatattttgaatatgaaacattccctgcaggctcatgtgtttgaacttaggacccagctagtgaccctgctttgggaggctgcggaacctttatgacatgacgtctacctgatgtgcagacttacgagttgttacacgccatcctaagcttccagcaatctttacgctcatgatagccacaggggtggaatctacagtcttgtgcctccactaccacactcttgacctgcttgcactactgaggcctccctgtcatgactggttgaattccctgacccctgggccagagtgagtacttacccatagttg

SEQ ID NO: 6846 - DNA, 600 bp, Cricetulus griseus
tattaagggactgatgaatacatagggtgtgaatactcagtaaaggatgattcaataatgaggctatttttccttttctttgataattaaatttttttggatagtaagagaataaatacttgctcaaaatggccccaaaattctgaggagacagagctctggattattttgtttcatatcaattcattaaaacacttatttctagcactgaaatcaggctaggaaacccacatttgggatcagtcccctatctgacacttaaggaaactagtgacattatttctcacaccccaaagatgtatttctgatggataggagacattggcggtaacttaataaacaacttttctgatgcctattgtaacatttcaaccatcactatcactctaaaagcccttaaattattttcttaggtagcaactgatggatttcactaactagcacaagtcactaaacatacataggaaatgggcaagccacaagttaatggcaggtcccataacttatataaagagagctagattcagagaaaaggatcttacttagactacttataattgtcctattggtccacagcactataaaagttcagtgatttga

SEQ ID NO: 6847 - DNA, 629 bp, Cricetulus griseus
  misc_feature (158)..(194): n is a, c, g, or t
gatagcaacacagagagcatgtggcaagactgctcataccatggtggtggtacagaaagggaagaggaaagcacagtgggggagacagatgataggtgatagataataaataggtatatatggatgatagatgatagatgatggatagatatagatgnnnnnnnnnnnnnnnnnnnnnnnnnnnnnnnnnnnnngtaggaagatactgattaagtaagagcaagttgcctggccagggattgttttatgtggcagcatatcgatgattcagaggacttacttgggaatgttgtaattatggcagcttgggaaggaggcgccacatctcagggcatgccgtatttactcttggtgaatgattattgcgttatcaattgatgtttctagataagagtgcttgattctactgaattaaaatacttctaggcactaaatcagagatttaagatttgaatgtttaatctccctctgacattatataacagaataaagtttatatcttaattgtgagacatgcctatgttggcatataattactgtcctaaattgtgtgcttactaaaggattcctaatattctatgctggacaatatacattattataatgaggtatgggagcagaatgggaag

SEQ ID NO: 6848 - DNA, 600 bp, Cricetulus griseus
ctataacaagagtggggtgggtaaagtcggcgaccagatcctgctggccatcaggggacagaagaagaaagcgctcattgtgggacatcgcatgcctggctcccgaatgaccccaaggtttgactccaacaatgtggtcctcattgaggacaatgggaaccctgtggggactcgaattaaaacacctatcccaaccagccttcgcaagaaggaaggcgagtattccaaggtgttggccatagctcagaactttgtgtgagcagagcggctctgagccatgcaaccattcccttcacactggtaacagaataaatgttttaatgtgtgttttcttcctatgctgtctgagctgcggttgtgaggagggtaacagcagttgaatactggcttcctccctcgacccccggagtggcctgggctttctttacagctcacaatcatgggtcattcagtgattcaacaaccgttgctcttctcttcttcacttgttggtctccttggggggagtaaggactcccttagtttctttaatagaatctcgtcaacacacataatattttgttaaagatactgtggggttaaagagatggctactcttct

SEQ ID NO: 6849 - DNA, 549 bp, Cricetulus griseus
gaaacctatgattatggtggttttacaatgatgtttgatgaccgccgtggacgtcctgtgggatttcccatgagaggaagaggtggttttgacagaatgcctcctggtcgggctgggcgtcccatgcctcctgctagaagagattatgatgatatgagccctcgtcgaggaccaccaccaccacctcctggccggggtggccggggtggcagcagagctaggaatcttcctcttcctccaccgccaccacctagagggggagatctaatggcttacgatagaagaggaagacctggggaccgctatgatggcatggttgggttcagtgctgatgaaacttgggactcggcaattgacacatggagcccatcagaatggcagatggcttatgaaccacagggtggttctggatatgattattcctatgcagggggtcgtggctcatacggtgatcttggtggacctattattactacacaagtaactatccccaaagatttggctggatccattattggcaaaggtggtcagaggatcaaacaaatccgt

SEQ ID NO: 6850 - DNA, 600 bp, Cricetulus griseus
agaggatgcagagcgtcagaagccatgatgcatgtagtgtgtgtgctgcagctgcagtgggccccagaccagagaaaagcagtaaagaatctacctcactgggaatatcatcattgctgacttcagatggattcaatcatccagtcccttcttcagggcaaagtcctgaggttggtagccctacgagtcttgctcgctctgtctctgcttcagtctgcgccatcaagcccagtgaccccaatagcattgaacctatagctatggaggctatgaaggcttcggctgaattgcagacgaactctaaggaaacagagcctcctgctctgcaggctcttcctcatctcgcttccccagcaggccaggatccagctatgcctttgcgtctttcatctgaagaagcatttgttacagataatccagagaaatctgtggaaagaagagcccagggcctcagagtttatctccacacaagacaggacactagtttatctctcacaactactgggatgcatgggctacaggggtttgtagaagaaaagagttggcatccagaaaatccgaaccccagtcaaatgaatggccttcagcaacacagagaac

SEQ ID NO: 6851 - DNA, 599 bp, Cricetulus griseus
  misc_feature (417)..(435): n is a, c, g, or t
aaagataattgttcatttgaagcatgtacaatgtaaacaatttcagatggccaggaaaagagtaagcacagtggaaataagatctttgaaaccagacttgtctgtgttttaattctacttgtgctttactgttgctttagaaatggggaagtgacccaacctatcctatgaaaccttggtgtttacatgtttgaaatgaggctaggaactggagacaaggttcagcaggaaatagtgcctgcttttcaaaaaggactcaagttttagttcctggtgcccatgctgggttgctcacaactgtctgtaattccatcttggcagacacacacacacacaccaatctccccaaaacttaaaaattagctggacatggtaccacacacttttaatctcagcattagggaggtagagtcagannnnnnnnnnnnnnnnnnntgccagcctgttatatatagaaagttccatgatggccagggttacatagagaaagcttgtctcaaaaaataaaaattaaataaaataagatggctaatggcaccaattcatgctttatctgttcaaacatgtttcccaaaattcaccccttttctcttcttgag

SEQ ID NO: 6852 - DNA, 610 bp, Cricetulus griseus
  misc_feature (153)..(175): n is a, c, g, or t
ctcggggacacccgcactgctatggctaccggtggcggcgtggcctccagagaggggctgcgctacgccgaatacctgcccccctccacccaaaggccggacgccgacatcgaccacgccgcgggaagaaggctgatagctgtaggactaggnnnnnnnnnnnnnnnnnnnnnnngtcgctatgcatttcaaatgtggaaacctctagaacaagtaatcacagaaacagcaaggaagatttcatcaccgagcttttcgtcctactataaaggaggatttgagcaaaaaatgagtaggcgagaagctagtcttattttaggtgtaagcccatctgctggcaaggccaagattagaacagcacacaagagaattatgattttgaaccatccagacaaaggtggatctccttacttagcatccaaaataaatgaagcaaaggacttgctagaatcgtccaccaaacttaaatgatgctgaaagatcctaccaaaggaaaaggtgcaaggctctagaagtcttcctacagaagactatggaacatggacttgcttcatattaaccaactctgttcttctgtcattaagtgtgcagcaataaaagatatgcacct

SEQ ID NO: 6853 - DNA, 233 bp, Cricetulus griseus
catatggttaagatatctttatttagataaacatcagccaaacacaagccagagcatgccaggggcagcaaggcagccaggccagagagaaggggtccccatgtgcctgcagacccttaagaacctaacatcctgacctccccttgaccacgctctgacaggagtagtcaggcacacctgtagccaacccttaggaggcgtagttacagtgtctccctacacaaatgggtgaa

SEQ ID NO: 6854 - DNA, 600 bp, Cricetulus griseus
aactggtcctcaagagctcatatccttcctgtgacatttcacatctgatgactgcaatgggaactttgatcccaactgtgggtcacattgatggaaacggactctgaagttcctagctaaaccaaaaccttgttggatttgctttcagtttgcttctcatatggcttggcttatgctctctctatctccagttctagcaatgtaactttagagggttttttcctccctaaaaataccttgcatcacacatggcttttcaacatctgtttccacagaatctgacctggagacaggaacttgagcagaatgtaaaagagaactagccaaggggaaatccttggtatagaggaatgtttcacagtctatgctttattcatttgaaaaccgtatttccaaatggaaacaaaacaggctgaacaaggaaagttcagtcactattgggtgtgtggtaggacacggcatctctggcagtcgaggttgttagtcctgttagtgttggtcgtaagccttcactctccttcttaatctctacatcaacctttcaccttgtttcagagaagtttttccgtctttggaaagaagcatcatacattctccatc

SEQ ID NO: 6855 - DNA, 600 bp, Cricetulus griseus
gaatgttcagtatgaaaacttgggaggcagacaagccaaccatttctttgccttcattcgggatatagatgaggaaggtctgtaatgttaggacctggtagcagtcctcagaacctcatagtaatggcttagtttaggtttatgtcagtttaatgaaaatatttgtatatgtcatctggaagcatgcctagtgttaaatcacttgcctggcttcagcaggtttccagataagttgagagaatacagtgaaactaaagccacagaattgacactcggttatggtcaggttagggcacaggttttatgaggaagattttaataggaggagagcaacttttatgaatataaaggaaagaatgcagcacaaatctgaatgagaaagtgtctgccctcctaatctagtcatgtgtggaaagggtgactggggtattttgtgggaacctgtaaggattaggattctagtgttggtggtggtggtgggggggggacatatgggtttactagagaaactaatgggggcctggagactgatatacctgggagcctagcatagcgtgcgtaccttaatcccggcctgatgacagggctggggcagggacc

SEQ ID NO: 6856 - DNA, 600 bp, Cricetulus griseus
gactgtaagttgtctgatatctctccaattggaagggatccctctgtgtccagttttagcagttctaccctcactccctcctccacatgcccctctctggtggactcaaggagcaactcaatggatcagaagaccccagaagccaactctcgtgcctctagtccctgccaagaatttgaacagtttcagatcatcccaactgtggagacaccctatttggcccgagcaggaaaacatgaatttctcaatcttgtcccagacattgaagaagtgagagcagggtcagtggtatctaagaagggatacctgcatttcaaggagccactttccagcaactgggctaagcatttcgttgtggttcgtcgcccttatgtcttcatctataacagtgacaaagacccagtagagcgtggcgtcattaacctgtctacagcccaggtggagtacagtgaggaccagcaggccatggtgaagacacctaacacctttgctgtgtgcacaaagcaccgcggggtccttttgcaagctctcaacgacaaggacatgagtgactgggtatatgcctttaacccacttttggctggcacaataagtcaaaac

SEQ ID NO: 6857 - DNA, 56 bp, Cricetulus griseus
ttctacaaactcttctaatcccaacattttcagcaaacgagcttatactattttat

SEQ ID NO: 6858 - DNA, 560 bp, Cricetulus griseus
gggctcactgactgaaaataagcaaggctttctgctttgtctacctttcagccttggagtagttaggttcatttgtgactccggagagcaataagccattttccaagagtaaataaaaatcatgatctctgatatactgtgccaggtcctttgaacaaactaccattacagcagcagcatccaccagctgcattggtgggatgttctaaatatgttcagtagccatatgtcctgttaagggctttcagtgtgtctaattccatggaagaactaaggccagaagaagggcatcagagggttatctcagcatggagaggcattatagctcaaggccaacccaaattttgtttagtttttggtttttggtattgtgtggttttgtgatcagggtctcactatgtagctactgctagcctggacggaactctatatgtagctcaaagtggcctcaagctcatagaaatgtacctacttgtgcctccagagtgttgggattaaggtatatgccaccacacccagatcaaaaactaatgttttttatttaagtggacacgtgtggt

SEQ ID NO: 6859 - DNA, 545 bp, Cricetulus griseus
tatccctccatggggagtgggctctagtgaagccacattatgcagcagagcacccttctgccatttttgacctctaaccaggacagaactagggtcattgacagattctggtcagggataagaaccagaacatcttgctttcagggttcctctccctcattgtgcctgaccaattattctattctcatcagcatcaccacagtgtccccatccatcatggatgacaacctcatggaagctgcatcagtagtccagtttcagtcaccctctgcttgctcatatactctaatatcttagaagattatgcgcagttggtggggtatagaaaggagtaaaggctcgaatcctacgttaaagtcctgttaacccctgtcatccctttactatggcgtgtcaacagttctatcacagtcactattgaccttgctagctctgtatcattctgcttatatatggctgtggctgcagagacagagatatctctgctctgataatagatgtttaaggtgcgcccaaagaaaaagtcattctaccgcccctgaaat

SEQ ID NO: 6860 - DNA, 600 bp, Cricetulus griseus
aattcaccatggagtaactactggttgaagttgatgcagagaattctggaccttgaggacaaagactaaaatgacttctataatgaggaaggagcatgtcttttgggcatttgtatgtctgttgctcagcattgtcccggagcttcttagtgctctgcctgaggaagttgatggacatgcaaaaaccacagattcagaacagccaccaatgaaaccgaagcatacattttgcgcaatgaaggtagatgatggaccgtgcaaagccatgataaggagttattttttcaatatttttacttaccaatgtgaagaatttatatatgggggatgcagaggaaacgaaaatcgatttgaaaccctggaagaatgtaaggagacatgcatcagaggttataaaaagaagactgtaaagacaccatctggagcagaaaagccagatttctgcttcttggaagaggaccctgggatctgccgaggcctcattactagatatttttataataaccagtcaaagcagtgtgagcaattcaagtatggtgggtgcctaggcaaccgcaacaactttgagactttggatgaatgcaagagcatctgtgagga

SEQ ID NO: 6861 - DNA, 600 bp, Cricetulus griseus
  misc_feature (121)..(142): n is a, c, g, or t
gggcatgtggcctgtggttcacattcagaaaaagaacacaaaaactcgagccaattttggctcccgcccatttgcgtatgcggaaggacaggcccatcgtaatgctgcggacttgtgcacnnnnnnnnnnnnnnnnnnnnnngctaactttgaggccctgccatttgctatggcatctgatagtgacaacgatgctggcaccagtattgcatcagatccaggcactcatgggccaccatgccgaattgctgcagtggccacagcccagcaacaatatgacagtgacacctcctgccattataaagtggagctcagctatgagaatttcatcacctctggcccagacccccatccccctcccattgcggatgatgaaagtgatgacgatgacgatgatgacatcccacaggaagaccactatgccctgttggtgaaagcttgggagaccaaggttttccctaccatccgaagacgctttcgaaatgaagctgagcggaagtcaggcctggaccagatcaagggtgctttacaactaggcatggtggatatcgcccggcagacagttgaatttctctatgaggagaatggcggcatcccaag

SEQ ID NO: 6862 - DNA, 574 bp, Cricetulus griseus
gtatacaccccaaccgggcgcccccggggggggggacccccatgaggaaggggaggaggggggggacccgccccgagggaaaaaaacccctaccgggggcaaagagaaaaaaaatgccaccccaaagaaaatattcccccacgccaacaggaagcatgcctagcggaaaatcactggactggcttaaacaaggaaccagataaactgagagaatacagtgaaactaaagccacagaattgacactcggttatggtcaggataaggcacaggatgtatgaggaagaactgaataagaggagagcaactttaatgaatataaaggaaagaatgcaacacacatctgaatgagaaagcggatgacctcctaatcgacacatgagaggaaagggcgaccggggcattcagggggaaccaagaaagaataagagcctagcgctgaagaaggtggcggcagggggccaaaggggcaccggagaaaatagcgagcccctgagactaaacacctgcgacccaaccagccatcggaaccttacaccaggccaagacgacagaacaggggccagggccacacgc

SEQ ID NO: 6863 - DNA, 600 bp, Cricetulus griseus
acataggactctcctgctgacggaggacatgcacacaggcgctgcgtgatgaatagcatcatgtgtgttgctttcccagccagaggagaggacatcttgcctcactccccaggagaggccccgtctcaggtgtgacttcagccaacatccaaacccatatacaggtccaaggtcacagggacagacaactttgccatcccctgaacgaacaggcagcgttggaatcttccagaaaagaccttcaggagtaaagcagagagaaagcaagtctgtccctgggcctgagggggcacaaacaactccttttctctgtagaaacaaaggaaaggcggtatagacttgaatcctcctcctcggtggatctggggaacgtatgattaggcacaataatgttctttttaaaattaacagcagaccttatgtagaaaagcaatcactggtactgaggtacaaagaagccatttgtgggattggaacagcagggaaccaggggatgaggtaggagagatgtcttgtgggaactaaagtcaaacaagaccttagagcagctgcccaggtcactgacagaagtgtgcggtatttgcactaaatcttcagtgt

SEQ ID NO: 6864 - DNA, 630 bp, Cricetulus griseus
  misc_feature (326)..(357): n is a, c, g, or t
tttcagtgtactgggaatcgcttttaactgagaagcacttctcttgtagatgtttttgtaattaagatatcgatttcagtgtatagggatgctaagcaagagtcacagatatacagatacaaatctagatcattacagaagagtcagtatgctgcttgtttagcactactgactgccattgtaagcatgcagaaaaggagcattgcagctagtgcaggcagattgcaaaggtgctgccatttgaaggcctcagacttgccgacagctgaagattcagcaagtaaaagctctgagatggagcaagagccatttgttgaaataggtgnnnnnnnnnnnnnnnnnnnnnnnnnnnnnnnnattttaggcaattgttcaactcatctctaataaagttctcattttcatcagtttttcaacattgccgttcagagctccacacagtttaaaatggtgaatgttttaaataagatctgataaaattctgaatgataacagtttatgtgtgatctacattaataaatattttggaagcctgaaaggtattactattggccctgtttgattagttagtaaggtaactaagatttaaaaggggtcccttctaaagcgtcccccacagcattaaaataa

SEQ ID NO: 6865 - DNA, 600 bp, Cricetulus griseus
agaagcgaagctcaggctactactataccagaactggagatgcccagcttgcctgctatttcagtgctgcagtggcctctgctaagtaaaaagtcttcatagagatctccctgtcagctccccagcatgacactgcagtacctcatgctcctgactgccctcctgatgggaggctccagcaagtccacagagagcaaggcccagcaacctgagtgttgtatgaatgcagtagacttcaatgctacctgcccaggcacaggcctatgtggcccaggttgctacaggcattggaatgcagatgggagtgttagctgtgtccggtgctggaatgggaccttcccgacatacaatggctctgagtgcagaattctcactggccggggcatgcagtttcccatgaacagaagcacagggactcctggacagccacattttgggggtcctgatgtggcagcttacctcttcctggggacactcttcatcagcacaggcctcatgctctctgtggctgggttcttctacctcaagcgctccagtaaacttcctgaggctttctacaggagagacagagcccctgtcctgcagcctggggaaacagct

SEQ ID NO: 6866 - DNA, 571 bp, Cricetulus griseus
  misc_feature (47)..(79): n is a, c, g, or t
  misc_feature (93)..(106): n is a, c, g, or t
  misc_feature (108)..(138): n is a, c, g, or t
  misc_feature (147)..(179): n is a, c, g, or t
  misc_feature (181)..(231): n is a, c, g, or t
  misc_feature (276)..(296): n is a, c, g, or t
  misc_feature (322)..(335): n is a, c, g, or t
  misc_feature (337)..(359): n is a, c, g, or t
  misc_feature (375)..(401): n is a, c, g, or t
  misc_feature (403)..(457): n is a, c, g, or t
cagagatccaggacacggagggcattccccctgaccagcagaggctnnnnnnnnnnnnnnnnnnnnnnnnnnnnnnnnngaccctgtccgacnnnnnnnnnnnnnngnnnnnnnnnnnnnnnnnnnnnnnnnnnnnnntgggtggtnnnnnnnnnnnnnnnnnnnnnnnnnnnnnnnnnannnnnnnnnnnnnnnnnnnnnnnnnnnnnnnnnnnnnnnnnnnnnnnnnnntagatccaagacacggatggcattccccctgaccaaaagaggttnnnnnnnnnnnnnnnnnnnnntgaagatggccggaccctgtccgacnnnnnnnnnnnnnngnnnnnnnnnnnnnnnnnnnnnnnacgactcaggggtggnnnnnnnnnnnnnnnnnnnnnnnnnnnannnnnnnnnnnnnnnnnnnnnnnnnnnnnnnnnnnnnnnnnnnnnnnnnnnnnnngcaagattcatgacacggatggcattcctcctgaccaaaagaagttgaactttgccggtaagcagctggaagatgggcggaccctgtccgactacaacttccagaaggaagcca

SEQ ID NO: 6867 - DNA, 56 bp, Cricetulus griseus
ttctacaaactcttctaatcccaacattttcagcaaacgaagctatacctatttat

SEQ ID NO: 6868 - DNA, 600 bp, Cricetulus griseus
gacagcccacagaattggaaaagatcttcaccaaccccacatctgacagagggctgatttccaaaatatacaataaactcaagaatctagccaccaaaacaccaatcaatgaaattaaaaagtggggcacagagcaattttttcttatgtttctcatttttcatttcactcattagattttgtatggaagaatgccaagtagggaagactgggggatctaccttgagggtgtcttttattgactcacaagcatgatgttttagggtttctgttgtgatgatgaaatactatgaccaaaggcatcttgggaaggaaatggcttattttaattacatttccacatcacacttcatcactgaaggaagtcaggacaggaactcaaacagcacaggaacctggaggcaggagctgatgcagaggccatggagagatgttgcttactgacttgttcctcattgcttgctcagcctgctttcttatagaacccaggaccactgaccctgatgtgttccctactcacaatgggctaggacctttccaaacaatcactaattaagaaaatgctctatgggcttgtctccatgtgtcccaatcttatgg

SEQ ID NO: 6869 - DNA, 600 bp, Cricetulus griseus
attgaggaggtgaagagcaccacgaagacgcagcgcatcgcttcccacagccacgtgaaggggctggggctggacgagagcggcctggccaagcaagcggcttcagggctcgtgggccaggagaacgcgagagaggcatgtggagtcatagtagaattaatcaaaagcaagaaaatggctggaagagctgtcttgttggcagggcctcctggaactggcaagacggccttggctctggctattgctcaggagctgggcagtaaagtccctttctgcccgatggtgggtagtgaagtatactcaactgagatcaagaagacagaggtgctgatggagaacttccgcagggccattgggctacggataaaggagaccaaggaagtttatgaaggggaggtgacagagcttactccgtgtgagacagataaccccatgggtggttatggcaaaactatcagccatgtgatcatagggctcaaaactgccaaaggaaccaaacagctgaagctggaccccagtatttttgaaagtttgcagaaagagcgagtataggctggagatgtgatttacattgaagcaaacagaggagctgtggaaagg

SEQ ID NO: 6870 - DNA, 600 bp, Cricetulus griseus
atgcctagggtggctctagagaaggagctagaagcgatcaaagcccgagtcagggagatggaggaagaggctgagaagctaaaggagctacaaaacgaggtagagaagcagatgaatatgagtccacccccaggcaatgctggcccagtgatcatgtctcttgaggagaagatggaggctgatgcccgttctatctacgttggcaatgtggactatggtgcaacagcagaagagctggaagctcactttcatggttgtggttcagtcaaccgtgtcactatactctgtgacaaatttagtggccatcctaaagggtttgcgtatatagagttctcagacaaagagtcagtgaggacttccctggccttagatgagtccctgtttagaggaagacaaatcaaggtgattcccaaacgaaccaacagaccaggcatcagtacaacagaccggggtttcccgcgtgcccgataccgtgcccggactaccaattacaacagctcccgatcgagattctacagcggttttaacagcaggccccggggtcgagtctacaggggccgggctagagcgacatcatggtattccccttactaaaaaaag

SEQ ID NO: 6871 - DNA, 600 bp, Cricetulus griseus
atgacatttttctcattttcagattgctacacagtgagtgaaattacccagtcaaagccagccacctcttatctgatgcactggctggctcctagaaacttaatcatctccagcgtcacctttttaataataaaatatataatgccaatccatcttccagtcctgaaaacaggtgccctctacttgcaaaggactttcatgttatgcatggcatgggttagctgaagcgatcaccctgttaaccctcatgcaggcaacttgaacataaacgtttcatctcttcccccaaggagccttgcttgacagcagcaacatgagtagatttctacccagacatttcctggcagtctcttcactagcagagattgtaaaagcagtcgtgcataacgggaaagaaaaaatgactctataatctgaatcccttttaaaaactagtatataacaattttacacaatagtggggctccttatgacattttaagacatgtacataatgtatttcaattcttatattctgataagtatattggttgatgtttcataccatgtattttttcaaacaaacccttttatatttaatataaacgcgagtgcgtgtgt

SEQ ID NO: 6872 - DNA, 630 bp, Cricetulus griseus
ggaccagcaggagcttctaggaggcggattaagtcacaccctctatcactaagaataaagatgaaaacttagtactggaaccttgggagatacactgaaaccagaggaatcatactttgtaatctcttgtgaaagagcgtatgttgccaagactcacctaaagctctgagtaaacactatttgcactatagcacaacatgacgctaattctatattgtgcccatgattgtgttaagggttagactgtatctctagtgctgaccagggcagatcaattacttacctcttatggtaggaggacgtcatgagaaggctgcatgctgtcccagaacagatgttttaatctcctggtaaaatcaataacatcctgaggattcagctcgtggaacatgaaattgtgttaaaaacagacgaactgtggagctggggttaagagcactgactgttcttaccgaggactagtgttcaatacgtaacccccgatggcaatctataactccaattccaataatctgactcccttttctgacttctgggggaactgctgctcagggtgtaagaaaaacatctatgcacacgaaataaaaccaaggggaaaataggtaaataattaggggataaaatggctaa

SEQ ID NO: 6873 - DNA, 600 bp, Cricetulus griseus
cgcggtttcgtctcaaacctctccctgcgaggaggagggcctgccgacggccggtccctttgcaggtgaaggaagaaactcttaattctggaagtagcgactcaataccatggccagcctcctaaatgaagatccagaaagaagtcgaatcacatacgtgaaaggggatcttttcgcatgttccaaaacagactctctagcccattgtatcagtgaggactgtcgaatgggtgctgggatcgctgttcttttcaagaagaaatttggaggggtgcaggaactgttaaatcaacaaaagaagtctggagaagtggctgttctgaagagagatggacgatatatatattacttgattacaaagaaacgggcttcacacaagccaacatatgagaaccttcggaagagcttagaggctatgaagtcccattgtttgaagaatggagtcactgacctctccatgcccaggattggatgtggtctggatcgtctgcagtgggagaatgtgtctgtgatcattgaagaggtgtttgaggcaacagacatcaaaattaccgtgtatacactctgaacagatgaagaatttggatgagcccgtggctt

SEQ ID NO: 6874 - DNA, 629 bp, Cricetulus griseus
  misc_feature (347)..(366): n is a, c, g, or t
ttgttttcatatcagcatatctgtgctatgttagggtttttaaaaaaaaaacaaagctattcccctgctggtttttatggcagtaccttattttgacactagggggcaggagctctcctgctccaatcactcatgggaacatttttccaattgcagtgttatgttgtggtttcagtgtttatcagtagattgacctgtagtaagtggcagaataaaagcagaaatgtcccttttcagtgtgtgttaataatgttgcttgatagtagtcttcaaaaaatgccttcaacttttattatttctgaaaataatttgaaacttgatcatgaagctccagctaaaatccagannnnnnnnnnnnnnnnnnnnatttgtttgtttgaggtgggtgtggtggcttcacaccaataattcctacactcgtggaagcgggagagtcaggcatttggacccagcctgggttacacatttttttgtcacatgatttgtgatttgaccttggcagtttccttgatcttttaatgtaaaggtcttaaaacatcaaaatattttattggagtagtcctgttgactaagaaaataaaattcagccaggcatggaggcttgtttccataattttgtacctgggaag

SEQ ID NO: 6875 - DNA, 147 bp, Cricetulus griseus
ggggttggcgatctctggtcataacgacgaagcgctatgtgaacatgacttcgcagacgcagaagctggcttgccctgcactcattaaggtgctgcggcttgaggtgagacagccttgcgagccaccagcccaggaactctgtggcc

SEQ ID NO: 6876 - DNA, 600 bp, Cricetulus griseus
aaaacatatttgaaagccacctattgattgctccttgccacccctttttctgcagcagcaaatacttgctatgctttttgtacctggaaagatgtttaaaataaggagttttgatgctagtggtatatatatgcttttgttgaaaacatgaaattctgtcttaagtgtatcaataacatctctaactttatttcatcatattacagtatatttttggatagatactaggtaataaggaatattgcaaggaaattatctacatgctaaaataaccacatttgccatttggtaacaataaatttgtttcaaatgccactttaaaaacaaatataattcttcctacacatttgtttatattcaatataatataatgtctgaccccagcactgtatgagccaagcacatgtttttgtcctgcctgcctttacacagcttgcccacctgtatataatagtagtacactattaaattagagcacatgcaggttcaaagagacacacagtgaactttaaagttcatcacgtcaggaccaataatcagtcatctaaaataatcctgccatatcatattttcaacatgatactacatacacctaataag

SEQ ID NO: 6877 - DNA, 609 bp, Cricetulus griseus
agcaaatcttgaagactatacaccattgtagaacaaaggattgtgtgactctgttgaggtttacattcctcctttggtagcatgcagagtgccttcctgtatcaaaaatgctaacacatgatgtgaaggctctatgtagataccagttcaacatccacatgttcaatgagttgtataggtattgttttaagcaatggggccttggcatcagtttgtggagagcaaaacgtaggttatttgtgggttcctatgtggtccctttggccaataacttaatttagatgtaattcaatctttgtactggaagcttcatttgataactagagatggccaattgaggctctgtctctccattatttggtgatttcatttagatcatctttaggtatgtatatattttaggaagctactactatattacccattaaatggctctttattttagctctctcttcctatattcccttcattgttctctgtagcacaaattctaattgatcttaataataaaaaccctgagtcaaatataggggtaaatgctgaaagatcagagaagcagagcagccagagcagttgttacctctactgaatccttagacaaaagggcca

SEQ ID NO: 6878 - DNA, 600 bp, Cricetulus griseus
tgctactgttacctttatcaactatttcatttttcctttttaaaagatgatattacttgtcctgcagtggacaatactgtacaaagaaaacatctgaggagagagattgtgtctgtaacattcctcatggcataattttctgaacttctggctgcaattaaagtactaatgggatgggcctttaggtttttgtttcacagtagagaaaatgcttgcattagataaagcagctaggatacaggtaagtcctacttgtatttgggttcaaagacagaagtgtgtgcatgctaggtacatctgacaacagaaatacagaataaaggacagtagatggttgtgcttcatttctgaactcttcagtgactgaaatttattagtatttacattatagctggctttccctagtgatcaaattcacttctcaagtttcttttgagtacaaacttgtttaaataacaggctattttattggtatatttctctgttctacctgttagccatgttctactaaataccagctttggcatcatcacttgaagaatcaggtgcctgtggtgcagagtacttttgcatgtttaatacccctaatttgttctgctg

SEQ ID NO: 6879 - DNA, 600 bp, Cricetulus griseus
  misc_feature (510)..(525): n is a, c, g, or t
gagtatgtgcccgagacggtgtaccgggtggcccggcactttaccaaggccaagctgattatccctatcatctatgtcaaggtgtacatgtaccagctcttccggagcctggcctacatccactcccaaggtgtgtgtcaccgtgacatcaagccccagaatctgcttgtggaccccgacactgccgtcctcaagctctgcgatttcggcagtgcaaagcagttggttcggggggagcccaatgtttcctacatctgttctcggtactaccgtgccccagagctcatcttcggagccacagattacacctcatccatcgatgtgtggtcagctggctgtgtgctggctgagctgcttctcggccagcccatcttccctggggacagtggtgtggaccagcttgtggagatcatcaaggtactaggaacaccaacccgggaacagatccgagagatgaaccccaactacacagagttcaagttcccacagatcaaagctcatccctggacnnnnnnnnnnnnnnnncggacgccacctgaggccattgcgctgtgctcgagcctgctggagtacactccgtcctcaaggctctcccccctg

SEQ ID NO: 6880 - DNA, 600 bp, Cricetulus griseus
  misc_feature (481)..(505): n is a, c, g, or t
aggaaggaggccagaggaattgggtccaagtgttctgtaacggggccgtgcccacggagctggccctgctatacatgatagaaaacggccccggggaaatgcccatagactttgccaagcagcccactgcttcctggatgtgtttgtctctcttggctgcactggcctgttctgctggtgatacctgggcttctgaggttggcccagtgctgagcaaaagctcaccttggctaataacaacctgggagaaagttccagttgggaccaatggaggagtcacagtggtgggactcgcctccagtctcctcggtggtacctttgtgggcctggcctacttcctcacacagttggtgtttgtgagtgacttagacatctctgctccgcagtggcccattattgcctttggaggtctggctgggttactaggatcagttgtggactcatacttaggggcaacaatgcagttttctggcctggatgnnnnnnnnnnnnnnnnnnnnnnnnncccagcccgagagaccaagcacatagcagggaagcccatcttggataacaatgccgtgaacctgttctcctctgttttggtcgccctcttgctcc

SEQ ID NO: 6881 - DNA, 600 bp, Cricetulus griseus
  misc_feature (383)..(403): n is a, c, g, or t
gaaggtcagctagttgcttctcaatctctctgagctaataggttttcaccccagcctctgactcatgaatcttattgataaatagaatgatagagatttaattaaaaactacttttggtggcaacagaggcaggagaattcatcaggacataaaaatcccaccaggccactgcctgaaaaaaacaggtcagaaactgtagagccacagttactggctgaaacagcagtagattcaggtgtagctgttgtgccattgtgctggtagaaaaacaacattttggtacccagtgtgaggtatcaaatgtaagaagtctttctttggcccaccagttcccgaataatgacacagagacttttttttttgttattggttggtttttgtnnnnnnnnnnnnnnnnnnnnnacagtcctggctgtcctggaattcactctgtagaacagtctcgccttgaactcacagaaatccacctgactatgcctccagaatgctgggactaaaggcatgtaccaccatcacctggtgagactttattatgaaagcttaggcttattcccaactagctattaaaacttaaattaacctgtgtatattaatctaca

SEQ ID NO: 6882 - DNA, 560 bp, Cricetulus griseus
actgggagagatgacagaactggaaggcatggcgggggaaagatgtagaaacttagtgcagtggaaactccctggaatctatgagagggacaccaactgaaatctcctagtaatgggggatacagagcccaaactggcggcaattttacaactaggcaaggctcccagcagttggacagggacatcaacccagacagaaaaccttcgacttacaatctgtccctcctgcaagacatgctggggcaatggtgacagagaactgactaaacattaggcagagtcaggggaactgaagaggggaaggaaggattgtaggagccagagggtttaagaacactatgagaatgtgggccacagaatcaactaagctgggctgatatcatctcacaaggactgaagcaataaacagggaccctgtatgtatctgagctaggtcctccgcatacatgttatggttgtgtagactggtgttcttgtgggactcctaacaatgggagtggggggagcactatctctgactcctttgcctgcacatgaaaccctttttctcctactgggtt

SEQ ID NO: 6883 - DNA, 594 bp, Cricetulus griseus
  misc_feature (71)..(99): n is a, c, g, or t
  misc_feature (134)..(152): n is a, c, g, or t
  misc_feature (221)..(244): n is a, c, g, or t
  misc_feature (442)..(464): n is a, c, g, or t
ccgatctcacctaatgtctacgcttctatgttgacaacgcttaatagtctatatagttatcataacagtgnnnnnnnnnnnnnnnnnnnnnnnnnnnnntatgcattcaaatcctatcggaattctggtgctannnnnnnnnnnnnnnnnnnaacgcgcgaccctacttgtagtagggtcatacacttacggatcagactatgtaaaagacctgaccctgnnnnnnnnnnnnnnnnnnnnnnnngatctctcatactactacctctaacctgattataatctaacaaagatgtatgaattactgtcacagcgcacagattgttagtcaatactgtagctatagcaactctatgacaaatgaacgaaacaggcataggactctaccagacattggatattgatccactatctacatcattaatcatattagatatctgactannnnnnnnnnnnnnnnnnnnnnngcaaaactatatttaaaaagaaaccgtctacaacaagaaacggtatacttctatactaattattgtacaaactcttgtaatccccacattttcagcatacgagcttatactatgttatatgctattcgaa

SEQ ID NO: 6884 - DNA, 368 bp, Cricetulus griseus
aagatgagcggtatttaaacctggtgctggagtatgtgcccgagacggtgtacctggtgggccgacgctttaccaagggcaagctgattatccctatcatgtatgtcaaggtgaacatgtaccaactgtttcagagcctgggctacattcactcccaaggagtgtgtcacagtgacatccagccccataatatgcttgtggaccccaagactgacgtcctcaagctttgcgatttgtagcagtgcaaaactagtcggttgggtgggagcccaatggttcctacatatagtactaggtactaccgtggcccgaacaggtcatatttccgagccgaaggattacacactcatccagtctatgtgtggaca

SEQ ID NO: 6885 - DNA, 600 bp, Cricetulus griseus
  misc_feature (418)..(437): n is a, c, g, or t
atgatggtccctcttcttcaatctcagcgctcaagcgtctggaacggagccagtggacagataagatggactttaggtttggttttgagaggctgaaagagcctggagaaaggactggctggctcatcaacatgcaccctactgagattttagatgaagacaaacgcttagtcagtgcagtggattactactttattcaagatgatggaagcagatttaaggtaagccctcgaccaagaaaactaaatcctacccatgaccagtaattgctctaaaatagggggtattcattcactttgtgtcagggaggaaatgggagggtgtaatgtgcaattgcttgcaacccatcaagagcatggctactatgaacttcatcagtcacatttaaaatatcccgagggaaggtggctcaggaggnnnnnnnnnnnnnnnnnnnntgttcttgcctgtgagagatgtgcagatctaaatttcatgtatgcagtatctttaaagagctgtcaaaggggctggagaaatggcccagtggctggtcttccaggggatgcaggttcaattcccagccacctacaaggcagctaacagctgtctgtaactgtt

SEQ ID NO: 6886 - DNA, 540 bp, Cricetulus griseus
aagcaggctgcaccactggagaatggtgcgacagaggaggaggaacccatcccgcccatgtccagttactgccttctggctgagaattcctacgttaaagtgacatacgacatccaagccagcctacagaaggacagccaagtgactgtgtcagtcatcctggagaacaagagcaacagcttcctgaaaaacatggagctgaacgtgctggactcgctcaacaccaagatggccaggccagagggctcatcagtgcatgacggtgtgcctgtgcctttccagctaccccctggtgtctccaatgaggcccagtttgtgttcaccattcagagcattgtcatggcccagaagctcaaaggcacactgtccttcattgccaaggacgacgatggggccacccacgagaagttggacttccggctgcactttagctgtagttcctacctgatcaccactccctgctacagtgatgcctttgccaagttgctggagtcaggagacctgagcatgaactctatcaaagtcgacggcattagtatt

SEQ ID NO: 6887 - DNA, 214 bp, Cricetulus griseus
  misc_feature (86)..(103): n is a, c, g, or t
actgtgctatctttgatctcacctaatgtctacgcttctatgtttaaaaagtataatactctctatatttattatagcagcaatcnnnnnnnnnnnnnnnnnnattattagtatgtattcaaatactatatacattctcgtgtttgcaacatgcgacgccgaattaggcttagccctactagtagtaacgacaaacactcacagaacatactat

SEQ ID NO: 6888 - DNA, 600 bp, Cricetulus griseus
atgcactttccccatatgtggggcactggcttcaaacaattcagttcagtaccattatttttcaatctcatgtttccttcgttagtaggtggtatagtacagttatgggaaaatggcgcattgcattgacacattggtagttccatggaagttatgtaggatgtgcatgtactatttgataatattttcttttgctttactgcctttacaaacagcaaaagtgtaaatttgtgccccttacatagtactcttatttttggtagtgttggtctaggtcacttacttattgaggagaccccacagagcaagtgcatcctagatatcaccctaaaacataccttccacatgatgaacaactattatatataattaaatattgctgcttatttttctgttggcctccccccagtttttgggcattttgttctaaacaactattttttacaattaaaagtgtaatatcaagataaaaatctggacttttgcttttcctggcactcaaactcaagactgggtttgaggagcaaatctgggttcataactgacaaatttgaaggagcacgtaagaaatggaaggcaggtaaagatttaaaccctaca

SEQ ID NO: 6889 - DNA, 629 bp, Cricetulus griseus
cattgtgtctgtgtcacagcttcccttcaggccactagagatgtatatttggatgccggtgagctgaggaggagacccccaagaaagggcggtcctcgagccttgtatgtacccatggaggggagtgactttgtgagggtcagcaatgtttactcatgcacaccctcctttcttgtgatattgacagccatcttccttgagtgaggtgtaaagccctcttaagatttttcagtaccccactcccaaagaatgtttaatatgtaaaaacattgcttgaaaagttgtctaccagtgaatttggggatgatctagggccagtaccacagctcctgcacagacaaccaagtcctctggcttaggagagtacaagagagtagccaaaagagtatagtacccaaggctcttacccttatcttggccagtgtctgggcagagcccagtcagtgcatactttcccctataattcttaggttacaaacttgagtttcagggaatttcagtcagcaaccggtagagtgaataaatacttggttaccagcctaataatgtgaactgctacacttatttttattctttaagaacacaaagactttatgcagatactttaactataaattaatgtaaaatgg

SEQ ID NO: 6890 - DNA, 600 bp, Cricetulus griseus
cccttcggcaacataggggcagcccatgcatgtcagcctgtatcacagaaggaaaagcgccaggtgcctgtgtctgcgccgatctgaagagctgtgcatgcagtatagcaggccaaggtctgagccacagcagcatttttatttgagattttgataactgtttatatgtgttgaaaaccaaaatgacatctttttaaagcttgtccataagtaaacatagatgtcttttatagtggaaaaaacacgtggggaaaaaaatcatctattttgatgcagcgtttgataaatgataaaacacccgacacctcactctttatactgcacagaatgaatgaggaggtctgggctggggagacgaaggtcaatgctgtttttgttttcttttaggatcattcccttttaccagcttttaaccgtctgatacccatagcaggcaaactctcctagttaacatagttaagttcagcacttgtctcgtttaatgtcaaggtttgcattttctacgggcagtctccttcctcacaaacccactgtgcaggtgctattgttgctcttagaaatattttcagaaatgttatcttctaagtgaaatttctagcc

SEQ ID NO: 6891 - DNA, 538 bp, Cricetulus griseus
tagcagacctaagctctcacagaggagtcagccctcagatcttgtttttgctcaactgagaggaatccatgaggtgctatctggcaggattaagtggattctattgctttggttctcctttccctgaggacctgatatttttttatgtcctcctagattttcttggtttgggtatgttgaggtttgttgagaaggaggttgaagcaaagttccaggagcgaaattacagtgtgttaagagtgtggggaaaattagttttatttttccctacatgggatacaacactgtgaaattcagtcttcaacagaaaggccctgcagttctcctaaaacatagttcttatttctttctttaacaaagtttaagctagtgttaataaattaaaagagaaattgcttgtctctccacctcagctttgttttatgcccgtttcatatcgttgtctgtgctgtaattcatacttttgataccatttctgatgtgtaaagtcggctgtcttgtaaatatcttataaagagttcaattgtaaataaactat

SEQ ID NO: 6892 - DNA, 600 bp, Cricetulus griseus
  misc_feature (371)..(390): n is a, c, g, or t
taacaacttatatgcttttattggttacaaaaatagagggaaagggcctgatgcattagacttaccggacggtatgaatggttcccaaggcagttgtctaagatgaaagtacaagtgaacccaagtcttgtcgttacccctgttaattttgtgtgtgtcatttgctgtatgaaagggatataatgtgtacttaggagtagttcctactttgtagtattttttatttgggtcaaaataagcttcagtgttcataaatatctgctcaaaattgttactttaatttcaggtttttttgtatgtaaattgccttaaattgatgctccctttcaagtgtactcatttgttctatttagacaatttagttgaacttnnnnnnnnnnnnnnnnnnnnaagggtcgaacccttgatataagaaagtggccaaaggacaagttttatggcttgtgggaaatggttgaaactttaactctttctcttacggattatatgccattattaggacatgtcccatatacgcggatgtttaagtttaactcatactcacaagcgatcacaaaaagcatattaaaataacgtggatggagctcttcgtggggaggg

SEQ ID NO: 6893 - DNA, 560 bp, Cricetulus griseus
aaacatgaggggtttttaaacctggtgctggagtatgtgccctaaaccgtgtacctggcggcccgagactctaccaacggcaagctgattatccctatcatgtatgacaaggtgaacatgtaccaactctttcggagccttgcctacattcactaccaaggagtgagaaacagttacattaagacccacaaactgctagagtaccccaacactcccgacctactagctatgcccattgtatcagtgaaaaacagcttggactcggggcggagccccaacggtttccttacatacaattaatctggaactaaccgtgcacgccacattgttatactttaggaaacaccaagacttagcacaatcatgcctatccattgtagacgagacaacgtgggcatgactgttctaggtaagcagcatgccctaattgaaccaggccctaatatctcacctggcaccactatggacgaaggtctcagcattgatccgcaatagggtcatggttgtcccgcatgctccaacccacaggtaacacgatcgcgattgtataaatccccacc

SEQ ID NO: 6894 - DNA, 420 bp, Cricetulus griseus
tgcttctgtggtctttgatagagttgaagacagatagttatggttataattttcttcacttattataaaaaataagttacccttctttttatttagacaaaaaagagagatgatgggggaaatacttctgtgtatgtttataaataaagtgcttgcttggccaatgagacagcaggttaggctggactaggagtcaaagaggattctgggaaatgtagtagagaagtgatgttccagacaggaagtgacatagcaaggagactcatatttaagaagaggaaaaaggaaatgttgctctctttcccctcggctcctgctccagcgggaagatgtgatccaccagctaggagggacgccaataaggcgtgcgataagataaggcttataaaatatatagatgtatgatgatggatactgagc

SEQ ID NO: 6895 - DNA, 307 bp, Cricetulus griseus; identical to SEQ ID NO: 3253

SEQ ID NO: 6896 - DNA, 206 bp, Cricetulus griseus
  misc_feature (120)..(120): n is a, c, g, or t
aagctgaagcagttccatgcctatcccaagactctggaggacttccgggttaaaacctgcgggggcgccaccgtgaccatagtcagtgggcttctcatgctcctgctgttcctttcccanttgcagtattatctcaccacccagggcatcctgagctctacctggacaactctcggggagataaactgaagatcaacatcgatgtt

SEQ ID NO: 6897 - DNA, 114 bp, Cricetulus griseus
tcaaatcggaccctgtaaaagctgtaaaatgataacagagcaacccgatagcagaaggggcaactcttctgttggattttctgtgttgcagcatacaagcaatgatccatattg

SEQ ID NO: 6898 - DNA, 213 bp, Cricetulus griseus
  misc_feature (176)..(176): n is a, c, g, or t
ccctatacctttccaacatccctcagcaccatcaactttgatgaggttccccccatggggtgaccatcggggcagatctcaaaccagccttgggctcgcaccatcctggcccaaaccttgggccctccttgcctggggccagctctgggtcaacccccaacccctgtgctcattgnctagcgcccaggggccctcccccaagcgcctggggcc

SEQ ID NO: 6899 - DNA, 236 bp, Cricetulus griseus
tgaatattgagtttgaagcttattccatctcagataataattatggcggaatcaagaagttactgcgacagcttttcctaaaagctcctgtgaacacctgggagaggtaacagatctcttgattcaacagatccctatttgggagtggtgattaagccaacggatatttcataagaccgcgatgatgaagtatatgaacatgagatcttccgcttcataagcctcttaaatttaac

SEQ ID NO: 6900 - DNA, 218 bp, Cricetulus griseus; identical to SEQ ID NO: 3258
  misc_feature (140)..(140): n is a, c, g, or t
  misc_feature (174)..(191): n is a, c, g, or t

SEQ ID NO: 6901 - DNA, 430 bp, Cricetulus griseus
  misc_feature (115)..(115): n is a, c, g, or t
  misc_feature (118)..(118): n is a, c, g, or t
  misc_feature (161)..(161): n is a, c, g, or t
  misc_feature (173)..(173): n is a, c, g, or t
tggggtgcaagcatatattataaaataatcacctcaaaggatatttaagatatccatcattttatacatttaccaacccccacctgtagggagacactgtacccccccctcctantancttggacaggggtgctgggacatgcccgtgagggcgtgggcanggaaagtctaanctgacatgggaaccattcttaagggaccacacacacacacgtgaatagcccttctttctggcccctctctctgggctggctgccttgctgcccctggcatgctctggcttgcgtttgggatgatgtttatctgaataaagaaaccttacccttacggactgcagatcgatctcatcacccaccccatgccttcttcgtctcaacctaatgaatacataaagtaacttaagttactgacaatatggggtcaatcccta

SEQ ID NO: 6902 - DNA, 104 bp, Cricetulus griseus; identical to SEQ ID NO: 3260

SEQ ID NO: 6903 - DNA, 419 bp, Cricetulus griseus
  misc_feature (37)..(83): n is a, c, g, or t
  misc_feature (111)..(135): n is a, c, g, or t
  misc_feature (139)..(163): n is a, c, g, or t
  misc_feature (195)..(218): n is a, c, g, or t
  misc_feature (221)..(239): n is a, c, g, or t
  misc_feature (261)..(308): n is a, c, g, or t
  misc_feature (310)..(326): n is a, c, g, or t
  misc_feature (341)..(361): n is a, c, g, or t
  misc_feature (363)..(375): n is a, c, g, or t
aatgtctacgcttctatgtgtgagaagggataatacnnnnnnnnnnnnnnnnnnnnnnnnnnnnnnnnnnnnnnnnnnnnnnnaataggtatgtattcaaatcctatcggnnnnnnnnnnnnnnnnnnnnnnnnnaccnnnnnnnnnnnnnnnnnnnnnnnnntagtgtcaaacacttacgggacagactatggnnnnnnnnnnnnnnnnnnnnnnnnggnnnnnnnnnnnnnnnnnnngtcatactcctacctctaaccnnnnnnnnnnnnnnnnnnnnnnnnnnnnnnnnnnnnnnnnnnnnnnnntnnnnnnnnnnnnnnnnnactatagccactttnnnnnnnnnnnnnnnnnnnnngnnnnnnnnnnnnncgacattttatatgggtccactatcttcatgatgaattatatta

SEQ ID NO: 6904 - DNA, 443 bp, Cricetulus griseus; identical to SEQ ID NO: 3262
  misc_feature (36)..(36): n is a, c, g, or t
  misc_feature (39)..(57): n is a, c, g, or t
  misc_feature (203)..(203): n is a, c, g, or t
  misc_feature (228)..(228): n is a, c, g, or t

SEQ ID NO: 6905 - DNA, 150 bp, Cricetulus griseus
cgcggggtgtctataaaacgtggatgggaccctgactgccccgcggcgataaaattacaaaagaaatggatgactttctacaaaaattgaggcgacggaccaaaattggagtggtacgggggtcatattttcaaaaattacaatatcggc

SEQ ID NO: 6906 - DNA, 419 bp, Cricetulus griseus; identical to SEQ ID NO: 3264
  misc_feature (34)..(34): n is a, c, g, or t
  misc_feature (42)..(42): n is a, c, g, or t
  misc_feature (65)..(104): n is a, c, g, or t
  misc_feature (211)..(211): n is a, c, g, or t
  misc_feature (237)..(237): n is a, c, g, or t
  misc_feature (243)..(243): n is a, c, g, or t

SEQ ID NO: 6907 - DNA, 144 bp, Cricetulus griseus
  misc_feature (97)..(97): n is a, c, g, or t
aaaatcactcatagaatgatggaaaaggcatgccattgggaggattggggtataagatcagagaactgaacacctgacattgctgtgcaaggtccantttcaaatttcaacaatatataagaaacaataaagataaatgccata

SEQ ID NO: 6908 - DNA, 219 bp, Cricetulus griseus
  misc_feature (83)..(123): n is a, c, g, or t
actttaatcacttctcgggactgggctatttcaatctcacctaatgtctacccttctatgttttagaagggtaatactctccnnnnnnnnnnnnnnnnnnnnnnnnnnnnnnnnnnnnnnnnncataggggtgtattcaaatcctatccgattctggtgtgtgcagcatgcgaagccccactaagcttggccctacttgtattagtgtgaaacacttac

SEQ ID NO: 6909 - DNA, 303 bp, Cricetulus griseus; identical to SEQ ID NO: 3267
  misc_feature (268)..(268): n is a, c, g, or t

SEQ ID NO: 6910 - DNA, 215 bp, Cricetulus griseus; identical to SEQ ID NO: 3268

SEQ ID NO: 6911 - DNA, 216 bp, Cricetulus griseus
  misc_feature (60)..(79): n is a, c, g, or t
  misc_feature (81)..(101): n is a, c, g, or t
  misc_feature (115)..(172): n is a, c, g, or t
gaccaagagttgattaccgttcatacactataggagaaacttgaaacgtgggtattgtgnnnnnnnnnnnnnnnnnnnngnnnnnnnnnnnnnnnnnnnnnctaccatgaggggnnnnnnnnnnnnnnnnnnnnnnnnnnnnnnnnnnnnnnnnnnnnnnnnnnnnnnnnnnggggaccactctagtagaatgaatctgacgcggattctctgtaa

SEQ ID NO: 6912 - DNA, 351 bp, Cricetulus griseus
  misc_feature (108)..(108): n is a, c, g, or t
ctgggactgtgttctaaaaccctgtcctcacaaaaagagataatttcaaatgactcgggtcacattctattcacattactcattaaatggacaggattcctgatagancatacttttcaagaaacattatgactcaagcatattaaaaattagggttcacttaaatataatactgagctataatggaagagtgaacaattcatggaaatattgatcttactaagttagtttcaagtaccagaatttagcaaatttatatcttttcacataccaaggatttatgaaagagcaaaggcctaacaattataaaaagagttgagggacaggaactctttgaatttcttctctctg

SEQ ID NO: 6913 - DNA, 296 bp, Cricetulus griseus
  misc_feature (35)..(87): n is a, c, g, or t
  misc_feature (94)..(114): n is a, c, g, or t
  misc_feature (173)..(194): n is a, c, g, or t
  misc_feature (204)..(225): n is a, c, g, or t
  misc_feature (227)..(241): n is a, c, g, or t
aatgtctacccttctatgtttaaaacggataatannnnnnnnnnnnnnnnnnnnnnnnnnnnnnnnnnnnnnnnnnnnnnnnnnnnngtatgtnnnnnnnnnnnnnnnnnnnnntggggcttgcagcatgcgaagccacactgagcttggccctacttgtactactggcaaannnnnnnnnnnnnnnnnnnnnnaaaaacccgnnnnnnnnnnnnnnnnnnnnnncnnnnnnnnnnnnnnnatactcctacctgtaacctgagtatcatccaacaaaaatgcgtgaattaatggca

SEQ ID NO: 6914 - DNA, 424 bp, Cricetulus griseus
  misc_feature (111)..(111): n is a, c, g, or t
cctgtgaggggaatattgcacagtatcccttctaattccattgctgagcatttagtatccttgccttaccgagttcaaaggggatgggaaagtaaagtgtctttttcttantgcattttcagttatggggatgtgaatatagacagagggctctgcaccaactaatggagacttgacttccgtggagaggtagctgtaatattgggtttcactagataaactacaacatttctttggtacagtttgtaaagtagttttgcacacattcaactcttgattggggtgaaaatcctttcagtcaagtaattagatacataggcaggcgtattcttacagcacatgagagaactgagactcaaacatgaaatggggcaaactagctgggaagttgcagagctaaagcaatccacacatctttcatgcc

SEQ ID NO: 6915 - DNA, 227 bp, Cricetulus griseus; identical to SEQ ID NO: 3273

SEQ ID NO: 6916 - DNA, 343 bp, Cricetulus griseus; identical to SEQ ID NO: 3274
  misc_feature (122)..(122): n is a, c, g, or t
  misc_feature (297)..(297): n is a, c, g, or t

SEQ ID NO: 6917 - DNA, 287 bp, Cricetulus griseus
  misc_feature (29)..(87): n is a, c, g, or t
  misc_feature (104)..(116): n is a, c, g, or t
  misc_feature (118)..(133): n is a, c, g, or t
  misc_feature (171)..(207): n is a, c, g, or t
  misc_feature (209)..(240): n is a, c, g, or t
aatgtctacccttctatgtttaaaagggnnnnnnnnnnnnnnnnnnnnnnnnnnnnnnnnnnnnnnnnnnnnnnnnnnnnnnnnnnntatgtattcaaatcctnnnnnnnnnnnnngnnnnnnnnnnnnnnnnaccacaatagcttggccctacttgtactactgtcaaannnnnnnnnnnnnnnnnnnnnnnnnnnnnnnnnnnnngnnnnnnnnnnnnnnnnnnnnnnnnnnnnnnnnatactcctacctctaacctgattatcatctaacaaaaatctatgaat

SEQ ID NO: 6918 - DNA, 344 bp, Cricetulus griseus; identical to SEQ ID NO: 3276

SEQ ID NO: 6919 - DNA, 288 bp, Cricetulus griseus; identical to SEQ ID NO: 3277
  misc_feature (27)..(27): n is a, c, g, or t
  misc_feature (164)..(164): n is a, c, g, or t
  misc_feature (185)..(185): n is a, c, g, or t

SEQ ID NO: 6920 - DNA, 410 bp, Cricetulus griseus; identical to SEQ ID NO: 3278
  misc_feature (106)..(132): n is a, c, g, or t
  misc_feature (173)..(196): n is a, c, g, or t

SEQ ID NO: 6921 - DNA, 382 bp, Cricetulus griseus; identical to SEQ ID NO: 3279
  misc_feature (86)..(86): n is a, c, g, or t

SEQ ID NO: 6922 - DNA, 121 bp, Cricetulus griseus; identical to SEQ ID NO: 3280

SEQ ID NO: 6923 - DNA, 240 bp, Cricetulus griseus
  misc_feature (34)..(65): n is a, c, g, or t
  misc_feature (67)..(80): n is a, c, g, or t
  misc_feature (109)..(152): n is a, c, g, or t
gggggtccgggctccttcaagtatgcctggggcnnnnnnnnnnnnnnnnnnnnnnnnnnnnnnnngnnnnnnnnnnnnnnctccctggggaaatttgagaccagcaaannnnnnnnnnnnnnnnnnnnnnnnnnnnnnnnnnnnnnnnnnnngggaacatgattactgggacttctcaagctgactgtgctgtcctaattgttgctgctggggttggggaatttgaggctgggatctcca

SEQ ID NO: 6924 - DNA, 401 bp, Cricetulus griseus; identical to SEQ ID NO: 3282
  misc_feature (116)..(116): n is a, c, g, or t

SEQ ID NO: 6925 - DNA, 600 bp, Mesocricetus auratus
gaggcaggtgagtttgggatgcacctccatctgtgtgggtcctgcacgcccagagaagcctggggagcctctcgtgctaggctggctcctcccaggaccatggaggtcactgtcctcagccctggcgggcccaggcagcagcatgagcggggctcagggatgcaggatgaggaccttagtattgggcacaactccagctgtcctcctggatcttctgggtgatgggattagagagagcctcagggaatgaaggctgaaggtagccccctctgagccatattttcacatgaagcctgactggggagagagaaccccgaggataggagaattggagtttatgcacgccaaaagttgcacagcccccgtggtatttcagttagtgagtgacagtcctgaggcataaggaggtcccttgccaggcgggaaagacttcttccccagtagtcacccaccctgcccatggctcctgatcaggtggagaaccctcaggtgtttgggttgagggagcccaggccctggctggaagtagcatctcccgatggagctgggatgatgcaggaagctcagaggctggctaggtgtgtcacacctatgtgggcc

SEQ ID NO: 6926 - DNA, 906 bp, Mesocricetus auratus; identical to SEQ ID NO: 3284
  misc_feature (323)..(389): n is a, c, g, or t

SEQ ID NO: 6927 - DNA, 346 bp, Cricetulus longicaudatus; identical to SEQ ID NO: 3285

SEQ ID NO: 6928 - DNA, 269 bp, Cricetulus longicaudatus; identical to SEQ ID NO: 3286

SEQ ID NO: 6929 - DNA, 204 bp, Cricetulus longicaudatus; identical to SEQ ID NO: 3287

SEQ ID NO: 6930 - DNA, 354 bp, Cricetulus longicaudatus; identical to SEQ ID NO: 3288
  misc_feature (41)..(75): n is a, c, g, or t

SEQ ID NO: 6931 - DNA, 354 bp, Cricetulus longicaudatus; identical to SEQ ID NO: 3289
  misc_feature (241)..(272): n is a, c, g, or t

SEQ ID NO: 6932 - DNA, 599 bp, Cricetulus longicaudatus; identical to SEQ ID NO: 3290

SEQ ID NO: 6933 - DNA, 548 bp, Cricetulus longicaudatus
cttcagtgcctgcatgtcagcctctaccctaggaaaggcttggctttgagaatccatgtgagatggggagaacagcacttcgttccattgtaagtaacaataggagacagatgtgtctccagcctcctgttgcagctttgcagacagccttatggactaggacagatgactcccagatctactcctgcagatcaccttcatattccttcccaagagcaccatcggcaactttcatccagtacaggacctgtgcaagggctcagtcaactgcagtacttcctgcctcttgactgtctagctagggagggccgaaatgctgagaggcctggggcactgactatgctgactttaagccttgactccacctgtcactggaaatgtgcaaacttgcctgagtctttacccaactgcctcagaactacagggttctgggtctccatgccgtctatgtaagatgccaggggcatgggaagctcacaggcagctgctctgaacatcttaggagaattgcttgaggaccacccccctgctgtgcacaatgtctggat

SEQ ID NO: 6934 - DNA, 537 bp, Cricetulus longicaudatus; identical to SEQ ID NO: 3292

SEQ ID NO: 6935 - DNA, 940 bp, Cricetulus longicaudatus; identical to SEQ ID NO: 3293
  misc_feature (324)..(342): n is a, c, g, or t
  misc_feature (377)..(393): n is a, c, g, or t

SEQ ID NO: 6936 - DNA, 1400 bp, Mesocricetus auratus
  misc_feature (170)..(184): n is a, c, g, or t
  misc_feature (812)..(938): n is a, c, g, or t
  misc_feature (1027)..(1042): n is a, c, g, or t
  misc_feature (1124)..(1145): n is a, c, g, or t
  misc_feature (1168)..(1194): n is a, c, g, or t
tcgctggccagtttgatcccatgattcctgatgcagagtgcctgaagatcatgtgtgagatcctgagttcacttcagataggcaagttcctggtcaaggtaaatgacaggcgcatcctagatggaatgtttgctgtctgtggtgttcctgatagcaagttccgtaccatnnnnnnnnnnnnnnncaaactagataaggtttcctgggaggaagtaaagaatgagatggtgggagagaagggccttgcaccagaagtggctgatcgcattggggactatgtccagcagcacggtgaggtgtgtctggtagagcagttgctccaggatcctaaactctctcaaaacaaacaggctgtggagggcttgggagacctaaagctgctgtttgaatatctaaccctgtttggcattgatgacaagatctcctttgacctgagccttgctcgagggctggactactatactggggtcatctatgtggcagtgctgctacagatgccaaccggagctggggaagaaccctggtgtgggcagtgtggctgctggaggcgctatgatgggctggtgggcatgtttgaccccaaaggacgcaaagtgccatgcgttgggctcagtattggagtagagcggatcttctccattgtagagcaacgattagaggctttagaggaaaaagttcggaccactgagacacaggtccttgtggcatctgcacagaaaaagctggctggaggagagactaaagcttgtctccagttgtgggatgctgggatcaaggccgagctgctctacaaaaagaacccaaagttactnnnnnnnnnnnnnnnnnnnnnnnnnnnnnnnnnnnnnnnnnnnnnnnnnnnnnnnnnnnnnnnnnnnnnnnnnnnnnnnnnnnnnnnnnnnnnnnnnnnnnnnnnnnnnnnnnnnnnnnnnnnnnnngaagaccttgtggaggagatcagaagaagaacaaatcagcccctctacgtctgctgaaggaagcagactagcagaggaagcaggattgnnnnnnnnnnnnnnnnaacaaaactgcatatgtacttaaatagtttgcacatttctgatccagcagaagactgaagggtggtcgggtacacgaggccnnnnnnnnnnnnnnnnnnnnnngttattatcggtaatcactggcnnnnnnnnnnnnnnnnnnnnnnnnnnngaacagaaaagaaaaaaaggccaggtgtacagtttcctagtcgggaatagggaggagcagtataggtcagtataggtggattaatcaagactgactcctaaactcctgtatgaacctgagatggcttcttgcagagccacataccagatgaatggatgcctccctacaacctgccgccaaaaagtccaataaatgtctcccccgct

SEQ ID NO: 6937 - DNA, 538 bp, Cricetulus longicaudatus
  misc_feature (200)..(221): n is a, c, g, or t
  misc_feature (435)..(510): n is a, c, g, or t
tgaaatttccttataattatggggggcactgattgctcaatggtaaagatcactttttacagaggatgcagacttggttcctagtacccatatggtgagctataatcacctgtaactcaagttgtaggggatccaatgccctcttctggtttctgtaggtacctacacatgaaattaaagaaaaaaaaaaaaactttacnnnnnnnnnnnnnnnnnnnnnntttacaattttacaaatgtttatatgggggcattgtttccctcctcctggccccatttctgagggtgcgagcactggcctcaccattagagcctttggtttccttttcagcatagaaagtacctcttagaccagagaagagatactggaggggtagttgaaaccttttgactttaggagtgttaaaaatgtcatctgagccaggcattggtggnnnnnnnnnnnnnnnnnnnnnnnnnnnnnnnnnnnnnnnnnnnnnnnnnnnnnnnnnnnnnnnnnnnnnnnnnnnnagagcgagtgccaggataggcaccaaag

SEQ ID NO: 6938 - DNA, 549 bp, Cricetulus longicaudatus; identical to SEQ ID NO: 3296

SEQ ID NO: 6939 - DNA, 1400 bp, Mesocricetus auratus
  misc_feature (320)..(338): n is a, c, g, or t
tgcaggaggagatctcagatctgactgagcagctgggctccactgggaagagcatccatgagctggagaagatccgaaagcaactggaggctgagaagctggagctgcagtcagccctggaagaggctgaggcctccctggagcatgaggagggcaagatcctccgagcccagctggagttcaaccagatcaaggcagagatcgaaaggaagctggcagagaaggacgaggagatggagcaggccaagcgcaaccacctgcgggtggtggactccctgcagacctccctggatgccgagacgcgcagccgcaacgaggcnnnnnnnnnnnnnnnnnnnatggagggcgacctcaacgagatggagatccagctcagtcatgccaaccgcatggctgctgaggcccagaaacaagtgaagagcctccagagtttgctgaaggacactcaaatccagctggatgacgcagtccgtgccaatgacgacctgaaggagaacatcgccatcgtggagcggcgcaacaacctgctgcaggcggagctggaggagctgcgggccgtggtggagcagacggagcggtctcggaagctggcagagcaggagctgatcgagaccagcgagcgggtgcagctgctgcactcccagaacaccagcctcatcaaccagaagaagaagatggacgcagacctctcccagctccagacagaggtggaggaggcggtgcaggagtgtaggaacgcagaggagaaggccaagaaggccatcacagatgccgccatgatggccgaggagctgaagaaggagcaggacaccagcgcccacctggagcgcatgaagaagaacatggagcagaccatcaaggacctgcagcaccggctggacgaggcagagcagatcgccctcaagggtggcaagaagcagctgcagaagctggaggcccgggtccgggagctggagaatgagctggaggctgagcagaagcgcaatgcggagtcggtgaagggcatgaggaagagcgagcggcgcatcaaggagctcacctaccagacagaggaagacaggaagaacctactgcgactgcaggacctggtggacaagctgcagttaaaggtgaaggcctacaagcgccaggctgaggaggcggaggaacaggccaacaccaacctgtccaagttccgcaaggtgcagcacgagctggatgaggcagaggagagggcggacattgccgagtcccaggtcaacaagctgcgggccaagagccgtgacattggcgccaagggcctgaatgaagagtagatcttgtgctacccaaccctaaggatgcctgtgaagccctgagacctagagcctttgaaacagcaccttaggcagaaacacaataaagcaattttccttcaagcc

SEQ ID NO: 6940 - DNA, 600 bp, Cricetulus longicaudatus
tctcggggatcttgtggggtctccgcccccctttccccggccaccagcctctccttgttcccagggatatctcgcccctcctgaaggaccccgcctccttccgagcttccatccgtaaagcagagaaatcttgacacatacacacactcatacagccctgttatcacaataagacatgtattggtcactcccaaaggtccttgtgcccgctgaggtcccctccctcaccctgtctgctcccccagacccaggaaaccataatgtgctttctattcctagagatatattttgggctttctagaagtttctacaaactcagagacactgttgtggattaacaaagtcctctgttgaagcccaagcccctgggatctcagaaggtaactgaatttggagatattcaccttaagtccacgcatggcggcaagatcgactacatcgcaggcgagtggccatgccaggccgtgctggtcccccactgtgcaggctcccctcccttcccttatgtcaccctcagtccatcccacacccatcccttctttcttcaacccctaatcctcttttagcactctgtttctcttgccttggtccctcgttgac

SEQ ID NO: 6941 - DNA, 600 bp, Cricetulus griseus
tctttgaacaagcaactcaaggaatgccgagcagccatagccccccggaaaagtaaaggtttacaggactggttaaagatctgcagagaactcggagggccacttactaatgcaggcttggcacagccatctcacaaacccaaaggcgccgaaatatgtctgcctgctttaactgtggaaaaacagggcaccttaaaaaggactgtaaagcccctgaaaggactagagaagtggagttgtgcaggcgctgtggaaaaggttatcatagggccagtggaatgcaaatccgtgggacataaaggtacgcttttaccccctacgagaaccttaactcccaaccaaaaaacggccgcgggcccatgtcccagggccctcagaaatatgggaaccagttccggaaaagcaactcagagaaggaagggactcccgaggacactccggagtggacctgtgtgccgcctccgacttcttattaaatgccccaaatcgaaatctgttcagcctgtctcaatccaatctccggggcctttaccccccccctcccccactaccattgggcttattttgggccgaggttccttgaccttacaaggactcatt

SEQ ID NO: 6942 - DNA, 117 bp, Mesocricetus auratus; identical to SEQ ID NO: 3300

SEQ ID NO: 6943 - DNA, 201 bp, Cricetulus longicaudatus
  misc_feature (64)..(115): n is a, c, g, or t
  misc_feature (145)..(158): n is a, c, g, or t
  misc_feature (160)..(172): n is a, c, g, or t
acagtgtgaataatgcacatgatggaaagagagatctgactcctgtaagttaccctctggctgnnnnnnnnnnnnnnnnnnnnnnnnnnnnnnnnnnnnnnnnnnnnnnnnnnnntgcacaagcaatacttgtcctctaaaatcnnnnnnnnnnnnnntnnnnnnnnnnnnnaagttttcattgctgccctattagaattc

SEQ ID NO: 6944 - DNA, 174 bp, Cricetulus longicaudatus
ctgcaggccctacccagaaccccaggcattccctgtgcaggcaccaggtgataatagcagctgcagggcaggcagaatatggggcatgtccctggtagtgggggacactgtgggaaggcttcaaagaaaacagtccaggtgacctgagaaattggaacagtagtgcccagagca

SEQ ID NO: 6945 - DNA, 600 bp, Cricetulus longicaudatus
atcctgacagctttgagactacagtgacagtgacatttcacatgcagacagacaaaccagggtggggccgtcctgcagaagcggctttcccaccggatgctctgaagtctgcctttcgtcagatccgagttaatcttctcccaaataaaccatgaggttaaagtccaggtttctgtgcctagagctggctggagtctggggggacagacagcaaccacagagtctgtgatgctgagagattttgtcctggctgcccaggggccaagctggccatcagaagtgttggtatggcctccactgtggagggggcagcagtacccagttggagagctttcaccaaaagttcctttacaaaccaggtgatggaaatttcctgtctctcacccagcacccatgagctgggccaaccaaagaaggccgttctctgggactgtttggtgactgctacccacacaggagctctgtgtcctagtcctgatcccttcaactggctgactggctgactcctacccctctcccccgttctgtcccatgtagataaatcccagagatatttcctggtttttcttgggacaagcaatgaatgctgaccatgaattc

SEQ ID NO: 6946 - DNA, 372 bp, Cricetulus longicaudatus; identical to SEQ ID NO: 3304

SEQ ID NO: 6947 - DNA, 390 bp, Cricetulus longicaudatus; identical to SEQ ID NO: 3305

SEQ ID NO: 6948 - DNA, 244 bp, Cricetulus longicaudatus
tcctatgctccccacctaccctccaaccacctgccagctcactccccagagatactgaggccctccacagggtcatcaaagtctgtcacatgatttgggggaggaccaggccctctttcctttatctgggctgaaatagtatccctcatagggaatggactcccaaaggccatttgtgctctagggataaacactggctccaaggttagaggtcccatagaatatcctggcctcctagctaaca

SEQ ID NO: 6949 - DNA, 388 bp, Cricetulus longicaudatus; identical to SEQ ID NO: 3307

SEQ ID NO: 6950 - DNA, 363 bp, Cricetulus longicaudatus; identical to SEQ ID NO: 3308

SEQ ID NO: 6951 - DNA, 600 bp, Cricetulus longicaudatus
tgagaaagaacagtactcagtttcatatggaaaaacaaaaaacccaggatagccaaaacaaccctgtacaataaagaaacttctggaggcatcatcattccttacttccagactccattatagaacccatagtcctgaaaacagcttggtattggcaaaaaaaaaaattgacagatagaccaatggaatctagttgaaaaccctgatatattaacccacaaacctatgaacaccttgttttttgtcaaagaagctaaagttatacaacgtaaaaatgaaatcatcctcaataaattttgttggcataactagattcggacatgtagaagattgaagattgatccatatgtataaccatgcactaaacttaactccaaatggatcaaagacctcaacataaattcagcttcctgaacctcctagaagagaaggtagatggaacaggagactgctttctgaacataaccccagtagcaccaaacattgggatgatctggccctgggtttttttggttggtagattttttgatgatggcttctatttcattaggggttataggtctgtttaaattgcttttctttcttgatttaattttggtt

SEQ ID NO: 6952 - DNA, 600 bp, Cricetulus longicaudatus
tgggttctataatggagtctggaagtaaggaatgatgatgcctccagaagtttctttattgtacagggttgttttggctatcctgggttttttgtttttccatatgaaactgagtactgttctttctcaaggtctgtgaagaactgtgttgtgattttgatggggattgcactgaatctgtagattcctttggcaagattgccatttttactatgatgatcctacctatcccagagcatgggagatctttccattttctggtatcttctttaatttctttctttaaagattcaaagttcttactatacaggtctttctcatttggttagtgttgccttaagatattttatgttgttagttgatattgtaatgagtgatctttctctggtttctttctcagtgcagttatcttctgcatatagtaggacttctgatttttttgagaatccagagaatcatcaggtcatacattgaaaaaacctgtactccaccaaatttgaaaatctaaaggaaatggacaattttctggatagatatcacttaccaaagttaaatcaagatgggctggagagatgctcagccgttaaaggcgaggctcac

SEQ ID NO: 6953 - DNA, 600 bp, Cricetulus longicaudatus
cacagcgggaagactgccctagctgcaaagatcgcagaggaatccaactttcccttcatcaagatctgctcccccgataagatgattggcttttctgagacagccaagtgtcaggccatgaagaagatctttgatgatgcttacaaatctcaactcagttgtgtggtggtggatgacatcgaaaggctacttgattatgtccccattggcccccggttctccaacctggtgttgcaagctcttcttgtgttactaaagaaggcacctcctcagggccgcaagcttctcatcatcgggaccaccagccgcaaagatgtccttcaggaaatggagatgctgaatgccttcagcaccaccatccacgtgcccaacattgccacaggagagcagctgctggaagctttggagcttctgggcaacttcaaagataaggaacgcaccacaattgctcagcaagtcaaagggaagaaggtctggataggaatcaagaagttactaatgttgattgagatgtccctgcagatggaccctgagtatcgggtgaggaaattcttggccctcttgagagaagaaggcgctagccccctggactttgattga

SEQ ID NO: 6954 - DNA, 1400 bp, Mesocricetus auratus
  misc_feature (510)..(539): n is a, c, g, or t
ttctacttgtcaaagcaatggacagtggagcaattccaggctacggtgtcagcctgtggactgtggcattccggaacccattcagaacggtaaagttgatgatccagaaaatactctgtttggctctgtcattcactactcgtgtgaggagccgtattactacatggaacatgcagaacacggcggggagtatcgctgtgctgctaatgggagctgggtgaatgacgagctgggcatagagctcccaaaatgtgttccagtctgtggggtacccactgagccctttagaatacagcagaggatattcggaggatttcctgcgaagatccagagttttccttggcaagtcttctttgagttcccgagggccggtggggctcttattggcgagcactgggtgctgacggcagctcacgttgtggaagggaactccgacccatcgatgtatgtggggtccacgtctgtgagaatggaaaacctggcaaacgttcagaagctcaccaccgaccnnnnnnnnnnnnnnnnnnnnnnnnnnnnnngggatgacctaagcacacggacaaattttgacaatgacatcgcactggtgcggctgaaagaccctgtgaaaatggggcccactgtttcccccatctgcctgccaggcacctcctcagagtacgaaccctcagagggtgatctgggactgatctcagggtggggccgaacagagaggagaaatattgttatccagctcagaggggcaaagttacccgtgacctctttagagaagtgccgacaggtgaaagaggagaaccccaaagcgagggcggatgactacgttttcaccagcaacatgatctgtgctggagagaagggcgttgacagctgtcagggggacagcggtggggctttcgctttgccggtccccaatgtaagggaccccaaattctacgtggcaggcctagtgtcctgggggaaaaagtgtgggacctatggaatctacacgaaggtaaagaactacaaggactggatactgcaaactatgcaggagaatagtgtccccagtcaggactaacccattcataccgccagcccctccccccaggacacagcaacgcattgctctcagaccctgtggtagtcccattatctcgcagtgatggagagaagatgcaggagtgccgttaacactgaacttgattgtcaagacacctgaatggatggagggtctgatcacaggcctgtgttgattactcaggtgtgaattccctcctgttattggtaacaacatggcagagactcctctgtcttgcaccattctgcagggtatcttaacctccgtttctttcacctgcttgattccatttataatccttggagtcctttatttacttacaataaagcatatttctaacctg

SEQ ID NO: 6955 - DNA, 600 bp, Cricetulus longicaudatus
  misc_feature (390)..(428): n is a, c, g, or t
catgcaggaccatcccctcagggttcttactggccatgcgaggcatctcagaactcctgccttttgttcccctgagcatcaaatgtcctccagaagacttggagcatttgctgagggccaaacacagacagatggtacccggggctggtctagaaagaacagtacagcatctgggacaatacagtacttgttttgtcacttaaacacagcctccctgagctgcctggtggagtcctgatacttcggccacatcagaatgccagctagactaaagagacagtagaggaagggcacagtgagggttggccatgaggaggtggttgagaacaccgactgaaggaatactcaagaggagagccctgacaaagcaggaggaatgtccagcccagnnnnnnnnnnnnnnnnnnnnnnnnnnnnnnnnnnnnnnncctgagtccttaagagcagacagtaagtgagatcagggtgagatcagaggaggtctgagaccctcagttagaaagatccccaagtccttcccccatacacacacctgcaagctgctaaaaacccactggagttggtgcctgggacttaatgaggtgcctgctgacatagcat

SEQ ID NO: 6956 - DNA, 350 bp, Cricetulus longicaudatus; identical to SEQ ID NO: 3314

SEQ ID NO: 6957 - DNA, 600 bp, Cricetulus longicaudatus
ttctgccatggagagccatgtaatttttgacgttctaatactgtgtccctgtctccaccgcctcactggcaggtgtttctcatcagctacacaggctacaaagactttacactgaacagtcaagcctcaggttcaagttatcttctatcttgctaagatgctgagactttgagtaaagtcacttttctcatgagactgtctctgttcacacagcccgacttacttatcaggcacttacaaaagatacatcagctccaaatccctctttattagagaagtcttctccctcatacagccagtaaccaactcgaaagacgactgtacccagcccttgatcctgtaaggagcactaaagaacatcccaactctgggaacagcaggcaagactgaggtggggcaccagactacaagactgaaacgtagggaggggttagggctctccacactgcctgtgttgtgtccaggccttctttagtcctcaccacccaatgccactgatgagcctttagactgcctcctctcaatgccatgggctggagcacagcacgtgacttatttgggtatgggtaagactagttcatagagcagtgacactcaacg

SEQ ID NO: 6958 - DNA, 271 bp, Cricetulus longicaudatus; identical to SEQ ID NO: 3316
  misc_feature (45)..(64): n is a, c, g, or t

SEQ ID NO: 6959 - DNA, 565 bp, Cricetulus longicaudatus
  misc_feature (372)..(373): n is a, c, g, or t
tcagctgactggctacatggccacacatgtgcgaattctcagcagatgcacctggaagactaagttgtggcctttggtaacctgaatcctctcaccttggagggggaaactagctgcctgccctgcacagagaaggattcagatactaagctaagacccaccatccccagactattgatgccttccctggactcagaggtgacagtatgcatctaagggctgtcacggaggaaaaggcagaggctaggattcccagccctgttcccaccactggaagaagcagtaggccccagcctacccctcctctgatgtttgctgttttgttgttgttgttaattcctcaccaggtggaaccagcactgtggggcttanntaagctcagccagctgttgctgaacacgggaatgcagtgcgtggcagagtcagcctggagcagtggaatggggagggctagggccacggaatcccaggcctagatggagcgtggtctgagtttggggcatagaaagctggggcttcaaaggggactctgtgggaaggtccaaggatgttcaactgctgcttt

SEQ ID NO: 6960 - DNA, 478 bp, Mesocricetus auratus; identical to SEQ ID NO: 3318
  misc_feature (220)..(266): n is a, c, g, or t

SEQ ID NO: 6961 - DNA, 787 bp, Cricetulus longicaudatus; identical to SEQ ID NO: 3319
  misc_feature (76)..(90): n is a, c, g, or t

SEQ ID NO: 6962 - DNA, 1400 bp, Mesocricetus auratus
acagaagatggatttctggctgtatgttcagaagctaaagggctcgtttccttgaagcactccacaactcccttcttaaaagtggagcccttccttcctggacactatgaagttttggatttaaaaccaaacggcaaagttgcatctgtggaaatggtgaagtaccatcattgtcgggatgaacccctgcatgccctctacgacagcgtggagaaactcttcccaggcttcgagttagaaacggtgaagagcaaccttcgtatcctgtttgacaatgctgtcaggaaacgcttgatgacggacaggaggatcgtctgccttttatcagggggcctggactcgagcttggttgcctcctccttgctgaagcaactcaaggaggctcaagtacagtatccactccagacatttgcgattggcatggaagacagccccgatctactggctgctagaaaggtggcaaattatattggaagcgagcatcatgaagtcctttttaattctgaagaaggcattcaggccctggatgaagtcatattttccttggaaacttatgacattacgacagttcgagcatctgtaggtatgtatctaatttccaagtatattcggaagaacacagacagcgtggtgatcttctcaggagaagggtcagatgaacttacacagggctacatatatttccacaaggccccttctcccgagaaggcagaggaggagagtgagaggctgctgaaggaactctacctgtttgatgttctccgcgccgaccgcactactgctgcccacggtcttgagctgagagtcccgtttctggatcatcggttttcctcctattatttgtccctgccaccagaaatgagagttccaaaaaatgggatagaaaaacatctcctgcgagagacgtttgaggactccaacctgctccccaaagagatcctctggagaccaaaagaagccttcagtgatgggatcacctcagttaagaactcctggttcaagattctacaggattatgttgaacaccaggttgacgacgcaatgatggcaacggcagcccagaagtttcccttcaatactcccaaaactaaagaaggctatttctaccgccagatctttgaacaccattacccaggccgggctgattggctgacccattattggatgcccaagtggatcaacgccaccgacccttctgcccgtactctcacccattataagtcagctgccaaagcttagatgctctctaaactctagtgtaaaagttaagtgtttcttctcactctgaaggagtagacatcgagacaaacacagaagtaatgcaaatcaaccatcaaccactcaggctaacataggcatggaaagaaataaaaatattacatctaaaatgaaaaaaaaaa

SEQ ID NO: 6963 - DNA, 600 bp, Cricetulus longicaudatus
ccgaggcggcggcgaagctagttgggtttacctcaccgctttctcgtgcctcggcgcctcctctgcgggcttcctcctcacaccgctcttcgctcccgccagccgaccgattccgtcatggcgacccgcagccccagcgtcgtggtgagccccgggactcttcagcagagcggacagccaggcctaggcggctggctgctcagtggcgccgctcggggcccgttggcgggccttgggtgttggggcccgcggaagtccggggcgggggcggtcaccgcttcccggaatccggctgcgcgtccccagagggcggcgggcagcaggatggaatggcggggttcagggctgggtctcccctgggagccccgagacggttgactgcttgtgaggcaggcaggtggaaatggcgttgccttgacatgtgcggccaccgggagcccggctgggagaggcggagggcgacttggagaaagatacctcacggagaggggagaggggagagggcgggggagctttctcggggagacccttgctcttgaagttcggggcttggcggccagggagagcttcggggggcgcctctggaaggagctccagtac

SEQ ID NO: 6964 - DNA, 275 bp, Cricetulus longicaudatus; identical to SEQ ID NO: 3322
  misc_feature (172)..(192): n is a, c, g, or t

SEQ ID NO: 6965 - DNA, 221 bp, Cricetulus longicaudatus; identical to SEQ ID NO: 3323

SEQ ID NO: 6966 - DNA, 285 bp, Cricetulus longicaudatus; identical to SEQ ID NO: 3324

SEQ ID NO: 6967 - DNA, 193 bp, Cricetulus longicaudatus; identical to SEQ ID NO: 3325

SEQ ID NO: 6968 - DNA, 459 bp, Cricetulus longicaudatus; identical to SEQ ID NO: 3326

SEQ ID NO: 6969 - DNA, 1375 bp, Cricetulus griseus
  misc_feature (572)..(726): n is a, c, g, or t
  misc_feature (1017)..(1061): n is a, c, g, or t
gttctttctgtttgtcgtaatgtggtgcccattcttcatcaccaacatcatggccgtcatctgcaaagagtcctgcaacgaacatgtcatcggagccctgctcaatgtgtttgtctggattggttacctctcctcggctgtcaatccactggtctatacactgttcaataagacttacaggtctgccttctcacggtacattcagtgtcagtacaaggaaaacagaaagccactgcagttaattttagtgaacactataccggcattggcctacaagtctagtcagctccaggcgggacaaaataaggactctaaggaagacgctgagccgacagataatgactgctctatggttacactaggaaaacaacaatcagaagagacttgtacagacaatatcaacaccgtgaatgaaaaggttagctgtgtgtgacggactggttgctgtgacgctggcacttgaacaagtttttagccttgtgtgtgggggtgggaataaggaggctgggacaaattagactactccagtgactcaacagaatctatatgcctcattgtattctgtgtatgannnnnnnnnnnnnnnnnnnnnnnnnnnnnnnnnnnnnnnnnnnnnnnnnnnnnnnnnnnnnnnnnnnnnnnnnnnnnnnnnnnnnnnnnnnnnnnnnnnnnnnnnnnnnnnnnnnnnnnnnnnnnnnnnnnnnnnnnnnnnnnnnnnnnnnnnnngcataaaatcaatctaattaatttctattattcaaattgaaaccttgctgccatgttgttgatgggtggcgcaggagtgagttggtgaactattattgtatataaaaatagctagaaatactaaaataatgaatagcctcttttaaaaaagtgtttaaaattcaccatgacacatattttgaaaataaaaaaatagtattatgaaacttgtattgctaatataaattaattgaaatacttgacaatattttttcattcttgccttttcatagatgccattttgaatgttcnnnnnnnnnnnnnnnnnnnnnnnnnnnnnnnnnnnnnnnnnnnnntgggaagggtttaaatgttactcaataacgtgctgcttctcttctacttcttggcttaacctgaatttgcaatgtgatcttgtttcgtatattttcctctctgtaaactatcaaaggataattttgcttttcgaaatacagttctagaacgcgcttcaaagaaacagcaccctggaggtatttggtcacgcactgtgggaccactgcattgtgcatgcgccctttgagctgtgaccagtacattgatttgactgccacagctaaacaataaactcaggtttctcgctgttagcagtagcttcttaggctgtttc

SEQ ID NO: 6970 - DNA, 600 bp, Cricetus cricetus
ctagttctcatggggctggccgagattgcgtccgtgcgctgtgaggtgagcggggcgcgggagggatgtgcggccacgtgtcgcgaggccccggctcgtgccgcccgcaagggacacgtgccccggggccgtgaccttgcgagcccgtgccgcccggaaggaaggcagcggttcctgacccgtggctgcaaacccttgcgacgcccacgggagctctcttggcgtcagcccggctctgcgctccaccggcgaggatggaggcaacccgcggcaggtgcaccccagcgcggccgccggagcagtcctccctgcagctccctgccgctttctttggtttcgctacgtgtacagagcagagccgacgtagaagttgctagacctaaatttagtccgggagtcactgctgatggatgcccaccggctgtgacttggaattagcactcctgggatgacttagtggtttaggagaagcccggctgtccggcgtgcatgtttagaagcccggctcggaatcctcagtaactgtaaaagtgagggggccagagcctgtcaaggatgtctgggagaggacaaagaatgcagtggctcattttattcaaa

SEQ ID NO: 6971 - DNA, 1161 bp, Mesocricetus auratus; identical to SEQ ID NO: 3329
  misc_feature (319)..(336): n is a, c, g, or t

SEQ ID NO: 6972 - DNA, 682 bp, Mesocricetus auratus
  misc_feature (615)..(634): n is a, c, g, or t
tgcatgcagaattgggctgtggttcccgaagcttctggctgtcaaaggcatttctgatattgctgacactgatcactgaaagggaactcgagaagcgatgcacatctcaaagctgccagctgctctcctcatcttctctgtggcactaaaccacttgaaggctacacctgtcagaagtggcaccaaccatcagatggacaaacggaagtgcaacacggccacgtgtgccacacagcgcctggccaactttttggtccattcgaacaacaaccttggtcccgtcctctcaccaaccaacgtgggatcgaacacgtacggcaagaggagtgctgcggagattccagacggggattctttggatctcttcctcctttagagtcggcatacttcttcatctcttgttattttgtgtgtaaatactctggcactttcacgaattatttaacagtgcctttttcatttctacttgtgagtgcactgcaacgtgttccatgctttctggctctgtgtgtgtaaaatcctcatcctaagaatggtttttaaactgagggctgaatcaagatcaggctgaagaccatgtctcttgacacaacatgttcttgaaatactgaaaannnnnnnnnnnnnnnnnnnncttataactttgtgattcaagtctaacaataaaggagactcctggagc

SEQ ID NO: 6973 - DNA, 336 bp, Mesocricetus sp.; identical to SEQ ID NO: 3331

SEQ ID NO: 6974 - DNA, 600 bp, Mesocricetus sp.
  misc_feature (90)..(90): n is a, c, g, or t
  misc_feature (97)..(98): n is a, c, g, or t
  misc_feature (114)..(115): n is a, c, g, or t
actgagagcatccacattctctctagatggtggtccatgaaagtgaggagtaatcgagccctcccgatgcagggtggaagatatgcagantgtgtannttccatggctccttgnncatcatacttaagttccatgtgactctttgccacatgcaataaaatttgccttgtttcaagttgtttcgtcttgtgcctttcctcttctccgcatgagatgatcctcttttgatgattttttttctccgatactgaatatcataagcagatggttaggcagaattaattggtaattgtgtgatgtgtaagtgggcttctggttatatgagattaagcattgcttcatgggtcaggagagagagcttgcaactctactttatatcagtagagacaaaggtgttcagacactgttcaatgctggatacactctcacatttctaggaatatattcttgatttagttaataatggctggttcacatacatgaatatagatgaatgtcatagtgttggtcttcagatctcagagcacggtgtagctcatggtgacatactcccaaatctcagctctggtccacctgcactgtaaagcacattttataagc

SEQ ID NO: 6975 - DNA, 579 bp, Mesocricetus sp.
gcttgtccttgtggtgtgactcaggttaggatcgggccaagtccctgggcttcaggaaaccttcaggtaaacccaggtcacccagcactcctttaccatgaggactagcttaggaccgagagaaaggtctccttctcgggttgcacgcagaggctcccatctcttcccttgtggtttgttgtttttaaagatagaatctcatatgtagccccggatggcctagaactcactagatagaccaggtgactcaaactcagagacactgactctgccttctgttgttcttagcatggaagaagaagccgtctcaaactgcctcttccattctgttcagtgttcttgttgaggaatgtcttattgtttattatttttccatgctattatttttcaatgctctgtctgccgtatgtgcttctcagaagaggaaaatggagtgtcaagagtggcattagaagccccttcaccaaatgaagggattgagacacttggattaaatacactctaagtccacagcgtacagtgacaagtgaacaactatgagccgattatatttccagggtgacaccttgtgtggagctc

SEQ ID NO: 6976 - DNA, 418 bp, Mesocricetus auratus; identical to SEQ ID NO: 3334
  misc_feature (323)..(324): n is a, c, g, or t

SEQ ID NO: 6977 - DNA, 748 bp, Cricetulus griseus; identical to SEQ ID NO: 3335

SEQ ID NO: 6978 - DNA, 80 bp, Cricetulus longicaudatus; identical to SEQ ID NO: 3336

SEQ ID NO: 6979 - DNA, 79 bp, Cricetulus longicaudatus; identical to SEQ ID NO: 3337

SEQ ID NO: 6980 - DNA, 600 bp, Mesocricetus auratus
  misc_feature (85)..(136): n is a, c, g, or t
tatttcttctcacaagcccttccttcagtcaagcctctggatcctactcctgttcctttgccctgccctgagtcctgccatcccnnnnnnnnnnnnnnnnnnnnnnnnnnnnnnnnnnnnnnnnnnnnnnnnnnnnagatcagatctgcctgtgtgctggctctggtccccagagtgagcaacggggccctgtttgatctccagtaaagtctgaatgacatttttcctgtgtcttgttttgctgctgtgactctccgtgttggctttttgggtggtctctgttttgttgcctgaaggaggggctggagaaagaattttagggactctggggttacttaaagtccttgatgtccctgtgtcctcaatcaggtattcccctggaagagatctccttcatttcccaactattcttcagagtgcagtgcctcagttgtccgtgtgtagtttgactcatgtttcagagacatcctgtgccgaagggaagtgttgagcaggctggccttggctggtccatcttctcatcagcttttctggctgcacacaccacccttgtttgtgttgccaacatctctcttcataaacattccccactgtctgcag

SEQ ID NO: 6981 - DNA, 600 bp, Cricetulus griseus
  misc_feature (76)..(131): n is a, c, g, or t
accacccccagatggaaatcccaaatcccaggtcctgacatgtggctgcttcgaagacagagagatgggggaaggnnnnnnnnnnnnnnnnnnnnnnnnnnnnnnnnnnnnnnnnnnnnnnnnnnnnnnnnatgtttgtgtatgtatgtgagtgtgtgcaaatactttgtatataaacagcacagctagtagttgtgttacaaataatatcaattaatagaattaattaaccatccttattgtctctgattgttagtgactgcttgggaattggctggacccaggcactcagacagggtgtttcccccagctccagtagacttttaccaatgacccagcctttaggcctgtgcagggctggagcaggatcatagggatgacagtgacagcaatgtggctatagccattaggactgagaaagcattgtgaccaggggtctcagcaaggcctgggtcctgccttcagtgtggcatccttggtgcatgtcttccaatcctacttggcctgagacccagccctccttcttggcttctggaaacatttgttcttccacaccagcaaccaggtagcaatggttccaggccagcatggagttctaga

SEQ ID NO: 6982 - DNA, 1269 bp, Cricetus cricetus; identical to SEQ ID NO: 3340

SEQ ID NO: 6983 - DNA, 392 bp, Cricetulus longicaudatus; identical to SEQ ID NO: 3341
  misc_feature (56)..(56): n is a, c, g, or t

SEQ ID NO: 6984 - DNA, 437 bp, Cricetus cricetus; identical to SEQ ID NO: 3342

SEQ ID NO: 6985 - DNA, 1400 bp, Cricetulus longicaudatus
aaggttaaatcatgtaggagattgggggacccagtttggcatgctcatcgctcatctgcaagatcaatttccagattatctcacagtttcacctcctattggggatcttcaggccttttataaggaatctaaaaagaggtttgataccgaggaggaatttaagaagcgagcctatcagtgtgttgtttcactgcagagtaaagacccagatttcataaaggcctggaacctcatctgtgacgtctcccgtgcagagtttaataaaatctacgatgcattggacatcactttaatagaaagaggcgaatccttctatcaagataggatgaaggatatcgttaaagaatttgaagataaaggatatgtgcaagtggatgatggtagaaaaattgtcttcgtgcccgggtgttccataccattaaccatagtgaaatcagatgggggctttacttatgatacttctgacctagctgctatcaaacagagactatttgaggaaaaagcaaataagattatctatgtggtggacaatggacaagctgtacatttccagacaatttttgctgctgctcaaatgattggttggtatgaccctaaagtaactcaagtgacccatgttggatttggtgtggtgctaggggaagacaagaagaagtttaaaacccgttcaggtgaaactgtacgccttgtagacctgctgggagaaggactaaaacggtctatggacaagttaaaggagaaggagagagacaaggtcttaactgaagaggaattgacagctgctcagacatccattgcatacggctgcatcaaatatgctgacctatcccataaccggttgaatgactacatcttctcctttgacaagatgcttgatgacagaggaaacacagctgcctacttgctgtacgccttcactagaatcaggtctattgcacgtctggccaatgttgatgaagagatgcttcagaaagctgctcgggaaaccaagattgttttggaccatgagaaggaatggaaactaggccggtgcattttacgattccctgagattttacaaaagatgttagatgacttatttctccacactctctgcgattatatatatgagctggcaactactttcacagagttttacgatagctgctactgtgtggagaaagatcgacagacagggaaagtattgaaggtgaacatgtggcgaatgctcttgtgtgaagcagtagctgctgtcatggccaaggggtttgatatactgggaataaaacccgtccaaaggatgtaatccttagggttggagactgtttttaccaaagtggctattagtactgtttactttttaaacaatcaatgtggatacaaaagtagtaaaggaattttcacaactaaaaaaaaaaaaa

SEQ ID NO: 6986 - DNA, 600 bp, Mesocricetus auratus
  misc_feature (350)..(368): n is a, c, g, or t
cggcccctctttctgagccccgcggtgcgcgctacggagctcggccagcctgctccgtcctgactcaccgctgttcgctcctgctgaggaacaagtcggtcaggaagccgcgcctcagccatggtgaggtggggggcgtcgccacgcggcctggggcgtcggcggggctcgacttgctggggcgccgggagcgcagagcccgggagagggctcccgccgcggcgagggcccgggagagggtcctcatggcggttgtgtaggagtgggcctccacttacgggtcgctgtttgtttttcccgcctgggtgataacaggcatttaaagataccggaaagacgcccgtggagcnnnnnnnnnnnnnnnnnnnaattcgaatcacgctcaccagccgcaacgtgaagtcgctggagaagggtcagtacgatgctcggggtggcttggtgatcgggaccactcctcctcgggctcccggactgccacgccggctggcctggttctccatagactgggaacaggtatgtctgatgcataggctgggctctggagggtttggctcggtgtataaagccacttaccacggtgttcctgtggccatcaag

SEQ ID NO: 6987 - DNA, 600 bp, Mesocricetus auratus
  misc_feature (503)..(530): n is a, c, g, or t
taatgcaattttcccaaatggagcagcatattgtatgggacgtatgaattctgactgttggtacttgtatactttggatttcccagagagtcgagtaatcaatcagccagatcaaaccctggaaattctgatgagtgagcttgacccagcagttatggaccagttctacatgaaagatggtgttactgcaaaggatgtcactcgtgagagtggaattcgtgacctgataccaggttctgtcattgatgccacactgttcaatccctgtggctactcaatgaatggaatgaaatcagatggaacatattggactattcacatcactccagaaccagaattctcttatgttagctttgaaacaaacctaagtcagacctcgtatgatgaccttatcaggaaggttgtggaagtcttcaagccaggaaaatttgtgaccaccttgtttgttaatcagagttctaaatgtcgcacagtgctttcttcaccccagaagattgaaggtnnnnnnnnnnnnnnnnnnnnnnnnnnnntgttcaatgattacaattttgtttttaccagttttgctaaaaagcagcaacaacagcaaagttgattaag

SEQ ID NO: 6988 - DNA, 114 bp, Mesocricetus auratus
tgatgaccagcactgctgtgtacccctcatccccatcctatacaagaccactgtgctcaaatttgaaaccagaatttctgtttaataaagtctattcttttcagtaaaaaaaaa

SEQ ID NO: 6989 - DNA, 543 bp, Cricetulus barabensis
  misc_feature (246)..(262): n is a, c, g, or t
gtgctagggtaccagggcctcctgagaaggaacaggtgcaaagcagagcaattagcccagaggcatcagtggacagacaggctggatttgatagggagccaccaggattacatcacctgctggcgagcaggccccataagtctccccgtgcatgccgggcagcaaggaaacttggttcttcttcaaggagccagaggacacggtaattaaaatatttttttaaaaaaaatcaaaacatttcgaagnnnnnnnnnnnnnnnnngcctctcacatggtgttctggcactccacgttcgctctagaagggaagaagagggggtgtcacaggtgctgagagttggacaagcccagagtgaggcaggtgtgcactgtgtgagctggcagctgctaatgtctttggaaactgctaatttacccttctgcaccagccacaaaaggggaccactcaattatccccccaagaggctgatgtttagctcgagctcaatttctgtctctgtctctgtctctctctgtctctgtgactccctctgacccccttcc

SEQ ID NO: 6990 - DNA, 600 bp, Cricetus cricetus
gtgttccacagtcctttggggaagatcgagctgtgtggctgtgagagaggcctgcatgggatacggttcctcagcggaaagaccccaagctctgaccccaaagaggccccagccagtcctgagttgctcggtgggccagaggatctgccagagtccctggtgcagtgcacaacctggttggaagcctatttccaagaacctgcagccacggaagggctccccttgcctgctctccatcaccctgtgttccagcaagattcattcaccagacaggtgttatggaagctgctgaaggttgtgaaattcggagaaatggtttcttaccagcaattagcagccctggcaggcaaccccaaagcagctagagcagtaggaggagcaatgagaaacaatcctgtccccatcctcatcccctgccacagggtgatctgcagtaacggcagcattggtaattactctggaggagggcaggctgtgaaggagtggcttctggcccatgagggcatcccaactaggcagccagcctgcaaggacttgggtcttactgggacccggctcaagccatccggtggctccaccagctccaagctatctggctga

SEQ ID NO: 6991 - DNA, 732 bp, Cricetus cricetus; identical to SEQ ID NO: 3349

SEQ ID NO: 6992 - DNA, 475 bp, Cricetulus griseus
gcagtgaaattttttaagtcctggttgatgggccgtgctactaggagcatggacaacagtggtgcctagggtgatttgaattgtggagacttggctcaaagaggttaatgagggaaagacttcttagtatgttgactagaggtttttcttgtgatatttgggggagagaatgtagttgtgttctgccatattgagattcttatcatgtattgagaaataaaactggggaataaatattaaggaataaacataagaaatcccagcatgactgagacaacattcgccctctctacttcctcaatctaagagtgcccacaaccccttgaccccatctcttcctctcatgtgtgctttcctctttcttttcttagtttctcagagaactcaatagtctattctggtcagctgaatgtggactttaccctctgaatccaggtaagctccaatgatgggttaaccctaaccctaaccctaa

SEQ ID NO: 6993 - DNA, 430 bp, Cricetulus griseus
gctctcccacaggtgcttgttgtcatgggtggatcttctgctgtggtcttagtgtttccagtctccacccagcagcaacacagcctttgagggcaatgaccactcttctgccattcaaggacacctgaagaatgatcatcaaagacactcagagcaaagttttgttcctcatcagccacctcaggcactttgttagcttaccctgaccacaccagtgcagactaaaaggggcgtgtgtatctgcagattaaaagattcagggatacactttaacatgttaaacactaaattaaaaaaatacctctctttgtctgtagctcaggttgatcaggacttctgccaccatgcccaggaaaactttattttattagcacttatttttagtattacttttaaaatgcttcagtaatttccctaaccctaaccctaa

SEQ ID NO: 6994 - DNA, 536 bp, Cricetulus griseus
  misc_feature (399)..(417): n is a, c, g, or t
gaagtcaggctgtatttctgaaaatttttaatctttaaacttctttcctttggaaaaaaaaagttttgggcaacaattgcattgagcactaacctcttgagttgtgcacagagcaggtctttgtcaccgagtatgtatcgttataaaggattacctggggctgtgttgagaggcgagcagcttcttgagaggctgtcctgataattaagccaaaagtcaaggcctgaaggagggttaaggctctgccgcaagtggaaagggagaggagagactggaactttgacaaatttaattgtataatccaatagtattaaaggaaaaaaggaagcacctgaggcaacttgaggtttaggggtccaccagatgcctgtattgaacatggaggtgcttttctgagannnnnnnnnnnnnnnnnnncattgttttacttagtcctcaagtgaccctgagaggaaatgccattgtcatcccaggagcttgtatgcgactaatgaatctgagatcagacaccatccctaccctaaccctaaccctaa

SEQ ID NO: 6995 - DNA, 343 bp, Cricetulus griseus
ggatgacagtctttccttcataagtccaatccccgtttggttcctttgcggctcccaattcctctagggtttggatgtctctttgttcatagtcccatgaggggaagggatggtcgttggtgggctctagagccaggaggttagtggtgtctgtggtcaggggccgcctctcgggcagccaagtctgcccttcgattgccccttgcttcgaaagaatcccctttttggtgccatgtagactgctcccaggttaacagtaataaaaaccccttctggatagaactttacagatgcaggagctggcccattgagttctctgaatgggccctaaccctaaccctaa

SEQ ID NO: 6996 - DNA, 592 bp, Cricetulus griseus
acagtcaaagtttccataaacagaacacatgcacccaggttacagagtatatgttttataaactaaaaatctccaaataaatgtagaaattataaggtattcagtaaagagaattggaaattgcaagtaattttgaaagatacaataaattgtttttcagtgataagaattttttattttttaaggagacagcatgaatactgttccccactaccaagaattggtacagtctaatttcctatatttaggaaaataactggggtcagcacatgcagagatcaatggaataagcatcaccttgaaggttacagaatctccccttccagataagaattaaattttaataaccttctcaatatactatcacaaattatcagttttgaatatgtgactccagcctcttcctctataagtataagcattctagcaattaaaactacatggatatttaccatcacattatatttatgcatgacattttctttttttaattattttttccaacttttttatttgaattagaaacaggattgttttacatgacaatcccaattcccttctcccaccagtcctcccctaaccctaaccctaa

SEQ ID NO: 6997 - DNA, 600 bp, Cricetulus griseus
  misc_feature (405)..(425): n is a, c, g, or t
ttgccagcactctccaaggacaaggaggaggagatccgcaaaatcttgaggagcaaccttcagaaaacccggcagcggctgcggtcctataacagacacacgctggtggccgacccctacgaggaagcctggaaccagatgctgctccggaggcagaaggcccggcagctggagcaaaagatgagcaactacctgacggtgccagcccacaagctagactcacccaccatgtctcgggcccgcataggctcagatccactggcctatgagcccaaggcagatttgcctgtcatcaccatcgacccagcctccccacagtcacctgagtctgtggacctggtgaacgaggaattgaaggccaaggtcctaggggtaaaccgggatccaacaaggctgactcggggnnnnnnnnnnnnnnnnnnnnntgaggatggtgtcattatgatgcggaggaaggagccctcatccccaggcaccgatgtcttcacccctgcaccaatgtacagccccagctcccagagaatacagcgctgcctcagtgacccaggcccccacccagagcctggggagggagagcctttcatcccaaagggcgagtag

SEQ ID NO: 6998 - DNA, 207 bp, Cricetulus longicaudatus; identical to SEQ ID NO: 3356

SEQ ID NO: 6999 - DNA, 600 bp, Cricetulus longicaudatus
  misc_feature (215)..(231): n is a, c, g, or t
aaactccttgaaaaataaacaaacaaaacaaaacaatacatataatagttaaattgtatcagttatgcccaaaatgtctctcaaaataaataaataaataatttattgttttgtttgagacaggtctctcttcataaccctggctgttctggaactcactgtgaagaccaggctggcttgaactcacacagattgacctgcttttgcctctgccnnnnnnnnnnnnnnnnnaaaagtgtacaccaccactcccagcttctttatattttccagagacggtctcactatgtatccttcgctgtcctggaactcagtatccaggctggcctcaaactcacaagacatctgcctagctctgccatccaagtgttaatattaaaggcgttcaacaccatacttggataatagatttttttaatgagacatttgacattttcctttattattgaccaccaaaatcaccttgattatcatcaccatcactgccattaccaccctcatcatcagcaccaccaccaccaccatcaccattgccattgccattatcatcctggctgtgtttacagctccatctctattggttgaatagccttagataga

SEQ ID NO: 7000 - DNA, 571 bp, Cricetulus longicaudatus; identical to SEQ ID NO: 3358

SEQ ID NO: 7001 - DNA, 591 bp, Cricetulus longicaudatus
  misc_feature (419)..(480): n is a, c, g, or t
gcagagatgaggaatggaacccaaggcattacacacacaagccaatggcaccctaccatctgaactgtgttgcctaactgtgatagttaattttcttcctcagcttgacggggtttcacttcaccatgcctctgggcagtggcatgtccatgaaggatttcctctctcttcctttctttcttatttattttgagtcagggtttctctgtatatgagtactggctgtcctggaacttgctctgtaggccaaacacagagatctgcctgcttcacactctggccaggccctcccccaaactgggaagcaaaacaactccttacattttatcagattttttgtcaaggcctcttccaatccatggaaccttaattaaaacatggtcacaaaaaatcaaagtagcctggcagtggtgcactgnnnnnnnnnnnnnnnnnnnnnnnnnnnnnnnnnnnnnnnnnnnnnnnnnnnnnnnnnnnnnnggcaagttccaggacatcagggctattacacagagaaactgtctaaaaaaaaaaaaagccaagccaaaccaaaccaaaccaacaaacaaaaaagccactccacagaagctt

SEQ ID NO: 7002 - DNA, 600 bp, Cricetulus longicaudatus
cattcctgccaggttggaaaacacagccttctgctcagtgacagtcttaatgtttgattgggaaggtacaacctctgcctctatccctcaacatatgggtgacctatttgcttgtaaaaatatgaagccttatcattaattaataaaaaagggggagatgtagggagccgtccctgcattctcctttacaagatgtgcctgcatccggcaggcaccgaatgtaaacaagattattgtgcaggcgctgggtaactttccattccttgatctctgcctattccgtggcgtcatatggtccaatgagctgcagccaatcatggggtgacacgtccgaggcggccgttgccagcctttattaggggacgggattcttggctcggggtctccgcttttgtaagcttatgctctcctctcaagacgcattaaagctttactgcagaaggatccgaatgtcctatgtggttcttgccggcaagacgatcgcgcgggacacatacttgcgccccagacctagctctgctttagcttcttcgttcaaagtaatcaccctgcacaattctcatctgcaggtttccctcacacaatgtgttcctcctccac

SEQ ID NO: 7003 - DNA, 424 bp, Cricetulus longicaudatus; identical to SEQ ID NO: 3361

SEQ ID NO: 7004 - DNA, 424 bp, Cricetulus longicaudatus
cgtagttgggagccaggctcggccctgaaggccagaatccaggagaatgctgttgagtcttctacatcagatgccaaggtttccacagagcaaccatggtgagtcctagtgagccacaaggtccagggaaggacaggctgttgggagcccatcccagaagagaagccaaggtgtcaggaacatgaggtagctggtcacaaggcatgcacagtcagaaagcacagactgatggatgctggtgctaggctcactttcttctcttttatttactctagctcttcacatcgctggaaggtattgccacatttggggcatatcttcccccccttaattaaatctctctagaaacagataggcctagaggtttgtttccatggtttttctaaatcccctcaagttgacaattgggactcaccatcacttt

SEQ ID NO: 7005 - DNA, 433 bp, Cricetulus longicaudatus; identical to SEQ ID NO: 3363

SEQ ID NO: 7006 - DNA, 433 bp, Cricetulus longicaudatus
tcatttggaaagagaataaaggacaaattctgctgcccctgtgcgacaggcttcaccaactaattaaatccacggtgctttctggccttatggagacttcgtgcaatcgatgtctggaatcttgtcacatccagaagatctgttgctgtccaggtttccatggcagctaaattttttcctttttgtgaaattatcctcagcccttggcgctagattgccacataagtggggtattatcagcttaatgaagggaccctttctgcaggctgtcttcctgtgctgtcaggaagtggcttgccgcacgctgcgatgtgttcagtcttattctcagtatccagctggagatgtctcacaaagctgggtggttgtgtgccagagaacatcttggggcctctgaagaatgagcaccccctctttgctttaatctggtacc

SEQ ID NO: 7007 - DNA, 1346 bp, Cricetulus longicaudatus
  misc_feature (1025)..(1055): n is a, c, g, or t
tgacaaacaaacttagattcattgctgaaaggagacgttctcaaaatggatttgactccaaggccttgcacatcttggcgtttcttcaggagttgaataaagaaagccagcaagcggccaaagtctctgaaaggggacaggactctgagaggcctgttttttcaccgtctttgcatgaggggggaaatgaacagtagtaaactggtgcccacaaggctactgctggaaggaaagtagaaacccttaccaagtagccattcagaatacttaacaactacatggaataagcatgtcctaacaggctgactgtagtatttatcagggttgctgggaaccctgtgatcagatgttggcacctaaatctctggatcatgtaggggtctcagaaagaggccagttggaggcacagacacagaggcctggcaaacagtctagatctctttctatttcttagagatagtttccatggtagcaaattttcaaaccccctctgtggatttgtcttgggtttgtttctgtatttatgtaaagcagtcaaattcctcctatgggtgagtttccatccttgagttattgctgatatgcacagccttgttctacataataacagtgtccatcaaaaaactgagcagtggctcagacaataatcccagcacttggcaggaggtgagacaggaggattacagtgagttggaggtcagcctgagcatgacctggaaaggggtgaagggtgttgagaattagacatgtaaatattaaatgattatgtacgttgcttgttagtttggatatgtatatgcctttataaccactatcatcatatgtttataaaacccagaaggtagtgattttgttttactgcataattttgaaatttacaaaatagtgctcaatattaattgagctcaaaatagaaactcaatagtgagttccaggtctaaaaacaaacaaaccataacaaaagctgagggaccaaatcaatcctccctccaattgcccagccagtcctcaatctaccgtgtccnnnnnnnnnnnnnnnnnnnnnnnnnnnnnnncagatggcaatataactggaaaaactgagaccagaggaagttagaaggcaggccatatgtgtgcaaagcaggaagtcaatgccaaacttccaagatgctctcggagggactgcttcctgactctgctctatttgtgagtatgatgctgcatgccccttttctgcctcaatcccagaaaacacaaagccaacaaatcatttctgaaacctctgaaacaaccaaccagaataaagctccctgttcttattatttctctctggtatttgtcacagcaagtgaaaactgttgggg

SEQ ID NO: 7008 - DNA, 1050 bp, Mesocricetus auratus; identical to SEQ ID NO: 3366

SEQ ID NO: 7009 - DNA, 978 bp, Cricetulus longicaudatus; identical to SEQ ID NO: 3367
  misc_feature (359)..(382): n is a, c, g, or t

SEQ ID NO: 7010 - DNA, 536 bp, Cricetulus griseus; identical to SEQ ID NO: 3368

SEQ ID NO: 7011 - DNA, 580 bp, Cricetulus griseus
ggggagtgggcggggcctccacccagcgggtagataaaaggccagggtgtagcacgctgaggcccagacaagcaaaggacttgcttgctctttcctcctggggcggaggtctgttttggtagtggcaagtgaaagaagtagctcctggcaagtcttccttcgttgcttggcaggatggaaggtcgcagccgtgtgggaaaaatcagggtggcccgggaatcccggcgcccaaagacccttttgaaaggcatgcagaaggaggcccttctaagtcgtttcgccaagagcccttccccaagcttccgggccagggagcaactagccagggaaatcgggctgcctgagtcccgagtgcgggtgtggtttcagaaccgccgaagtcgttcggggatggtgaggcgaggcccagaatcctcagcgagccgaagcgtcctggagtccccgaagccgcctgaaatgtctgatgccagggcacaaggtagaaggagcagcccgtcgggacgtaggaggcctcgcactcgactcagctcgacacagttggccatcctgctccaggcttttgagaggacgtacccgggca

SEQ ID NO: 7012 - DNA, 600 bp, Cricetus cricetus
tcctgaagaaaacattgaagatccaggatgtcggccttatgcctatgggtggcatgatgcctggtgcagtccctgctgcagcagcagcagcccctgaggtggctgagggagaagacatccttaaacagaaagagcggacacacttcactgttcgcctaacagaagcaaaacctgtggacaaagtgaaactgatcaaagagatcaagaactatgtccagggcataaaccttgtgcaggccaagaagctagtggagtccctgccccaggaaatcaaagcaaacgtcgccaaagccgaggcggaaaagatcaaagcagccttggaagcagtgggtggcactgtagttctggagtgacactctctttctgaggactttcggactggggtccctgggacctgggcaaaggcctgctcacccctgcttcactcccaggtggcttgttgggagcaacagctgctgacacttggtgaccgaattctcctgggagagggacaggatggacctactgtgatggggaggggcagtttacagcctgtgcagactctcaagagattgccttgagatgctataaagtgaacagccctggaggcgactaagagag

SEQ ID NO: 7013 - DNA, 927 bp, Mesocricetus auratus
aaatccaacatgaaaatcctcgtggccgttgcggtcttttttctcgtttccactcaactgtctgcagaggaaatcggtgccaacgatgatctaaactattggtccgactggtctgacagtgaccagatcaaggaggcgctgccagagccctttgagcatattctgcagagaatcgcccggagacccaagcctcagcagttctttggattaatgggcaaacgggatgctgattcctcaattgaaaaacaagtggccctgttaaaggctctttatggacatggccagatctctcacaaaaggcataaaacagattcctttgttggactaatgggaaaaagagctttaaattctgtcgctttcgaaagaagtgcaatgcagaactatgaaagaagacgtaaataaactccatagcacactattattcagcttcatttgtgtcaatgagtggtgaaaggtaaaataaaatgcactatgaggaatgattatttatttaataacaaatgttgttatgagtggcggaactcaaaaaagtgtttattttttcatattgtgccaataagaggttgtaattctaaatatggggacctcctcaggaagtaggagttaggtagtaattcccagcaaaagcacggtgtcgatggtattgcacaagcttgccaaggatgcagtcgccaaagaaagacatggccactcagagccagttcagacagctgctgccatgagcgcaggaactcctgtgtgctcttgtgcttttaggctgacagtgtagaaactttggcatctgactctattggtatcctagcagcatgtttcatgttttgtgactatatagagatgtttttaaaagtttcaatgtgactccctggtcttcattcattgtatgatgtgttgtgatagctaccattgtaaataaaagaatctatcttc

SEQ ID NO: 7014 - DNA, 882 bp, Mesocricetus auratus
aaatccaacatgaaaatcctcgtggccgttgcggtcttttttctcgtttccactcaactgtctgcagaggaaatcggtgccaacgatgatctaaactattggtccgactggtctgacagtgaccagatcaaggaggcgctgccagagccctttgagcatattctgcagagaatcgcccggagacccaagcctcagcagttctttggattaatgggcaaacgggatgctggacatggccagatctctcacaaaaggcataaaacagattcctttgttggactaatgggaaaaagagctttaaattctgtcgctttcgaaagaagtgcaatgcagaactatgaaagaagacgtaaataaactccatagcacactattattcagcttcatttgtgtcaatgagtggtgaaaggtaaaataaaatgcactatgaggaatgattatttatttaataacaaatgttgttatgagtggcggaactcaaaaaagtgtttattttttcatattgtgccaataagaggttgtaattctaaatatggggacctcctcaggaagtaggagttaggtagtaattcccagcaaaagcacggtgtcgatggtattgcacaagcttgccaaggatgcagtcgccaaagaaagacatggccactcagagccagttcagacagctgctgccatgagcgcaggaactcctgtgtgctcttgtgcttttaggctgacagtgtagaaactttggcatctgactctattggtatcctagcagcatgtttcatgttttgtgactatatagagatgtttttaaaagtttcaatgtgactccctggtcttcattcattgtatgatgtgttgtgatagctaccattgtaaataaaagaatctatcttc

SEQ ID NO: 7015 - DNA, 1400 bp, Mesocricetus auratus
ctgccggtggattgccgagggggtcccagagacggaccctctaatgtgcaaggctccccaggcccctgcctggccagcttgcgagtccctctttcccctggacttcctgacaccatggagttggccaagagcaagagcaagaagcgtcggaaccgcacaaccttcagcacattccagctggaagagctggagaaagtcttccagaaaacccactacccggacgtgtatgcccgagagcagctggctttacgcacggacctgacagaggcccgggtacaggtctggttccagaaccgcagagccaagtggcggaagcgtgagcgttatgggaagatgcaggaggggcggaaccctttcactactgcctatgacatctctgtgctgccccgaactgacagccatcctcagctgcagaactctctgtggcccggttcagggtctgggagcccaggggggccctgcctcatgtctccagagggtatcccctctccatgcatgtctccatactcccactcccatggaaacgtggctggcttcatgggagtgccagcctcccccgcagcccaccctggcatctattccatccatggctttcctcctgccctgggagggcacagctttgagccttctccagatggtgactacaagtccccaagcctcgtctcgctcagggtaaagcccaaagagccccccagcctgctgaactggaccacgtgatgggttacggggacacagaacgagctgctcactcctcttcctgctctcccctgctcctcgccccatctctgcctggacaccggacagaaaccctctgctccatgtctgggtgggtcccagaagcttgggagagaagcttcagggatcaggctacagggtcttaagctctaaaaaggtgggaccccctgagagactcaagcatgtaggacactttctgtaaactgggtcccctcgttcaaattgggctagagacactgcctgttttctcaaagactatttctaagtctggggagccagcccaggaagacgggaggagaatgcagactgagcagggaggagctctctctctgtggcactcagggctggcctcgcttctgcctttctaccaccagggggcgtttgctaagtgcccggagctgacacgtgcccagaggacaaaggtcagcttaataaaaggcgggggtttcctctgctccaagcatccctcaaatctttctgccccgtacccagtctatcaatatactgtggagtcattttctccaaggacggaaaagattccaccaatcattaaatatttggatttgctttcatgggatcaggccagggctatgccatggaaaccatattggatgttgatcaaaataaaacagatttttctagtctctgaaaaaaaaaaggaattc

SEQ ID NO: 7016 - DNA, 1400 bp, Mesocricetus auratus
  misc_feature (54)..(78): n is a, c, g, or t
  misc_feature (231)..(262): n is a, c, g, or t
cagccgtccctgggaagccaagtgaaaaccaggacgaaagacaaataccgggtnnnnnnnnnnnnnnnnnnnnnnnnngagctggagaaggagtttcactatagtcgatacatcaccatcaggcggaaagctgaattagctgccacactggggctctctgagaggcaggttaaaatttggtttcagaaccgcagagccaaggaaaggaaaatcaacaagaagaaattgcannnnnnnnnnnnnnnnnnnnnnnnnnnnnnnntggcatcacctccaccacagccctcgcagcctcagccagggtcgctgaggagcgtgcccgagcccttgagtcccgtgtcatcactgcaaggctcggtgcctggttctgtccctggggtcctggggccagctggaggggtgttaaaccccactgttacccagtgacccctcccatggtctgtagcggcggcagagcaattccaggctaagccatgaggagcatgggcgctgctagagtcctcagaagagacccctctcctgccacccacaaacaatacctacagatgaagaatggggacggaagtaaagacaagtgggactgtgggcctcaggggaagatatggtccagttttttattttttccattctgactcttccggccagtgatgacaaaggaagtgatctctgggccttcgttcatgctccctgccaggactggctacaagctttcagcctcttctgccccggctcttagcttcccatatggactgtgtatctggttggagggagtgaggctgggagaatgagcaatacttgagccgagatggctgtttcctactgactgctctctgagaaccagctggacgtcctgcctcaggggcagggacagttcaaactgcaggagccagaggcagctgcatcgcaggctgggctgatcaaagtctgcagagcccccaggtggtctgtgtttttcttctccctttacagacctggaagggttggtgggttcagggactgcggccagaggagggggtggtcaccaactccaggccctgcgacaagggcttgtttggaaagcctgtcaccagagctgctgtaggctgaatgtatgtctgtgttgtaaatgccagagccaacctggacttccggttctttccctagtctctggctggtgaagaacggagctgttgctgctgttggagtcattgatctgtgtaaccagctaagcaagcctttaaaaagccatgggtagacaggtgatacggtgtagggaagtaggggtatccgaacacagtcgacttttattttctaagaagacaagataaaccaactttacagatttcagatcctggcatttatcttctttggattttgacaaattattttttttcaggaaataaaatatgttctctgattgt

SEQ ID NO: 7017 - DNA, 264 bp, Mesocricetus auratus; identical to SEQ ID NO: 3375

SEQ ID NO: 7018 - DNA, 600 bp, Mesocricetus auratus
aggatggcaaggaccacaagcgacccaaacgtcccagaactatcttgacaacccagcagaggagagcattcaaggcctcatttgaagtatcctccaagccctgcagaaaggtgagggagactctggctgcagagacaggactgagcgtccgtgtggttcaggtgtggttccagaaccagagagccaagatgaagaagctggcgcggcggcagcagcaacagcaacaggatcagcagaacacacagcggctgagctctgctcagacaaatggtggtgggactgctggaatggaagggatcatgaacccctacacagctatgccaaccccacagcagctgctggccatcgaacagagcgtctacaatgctgaccccttccgacagggtctcactccaccccagatgcctggagatcacatgcacccctatggtgctgaacctcttttccacgacctggatagtgatgacacttctctcagtaacctgggcgactgcttcctagcgacatcagaagcggggcccctgcagtccagagtgggaaaccccattgaccatctgtactccatgcagaattcctatttcacctcttgagtcttctaga

SEQ ID NO: 7019 - DNA, 600 bp, Mesocricetus auratus
  misc_feature (145)..(171): n is a, c, g, or t
gacgttccaaggagcgaaggatgaagcagctaagcgccctgggcgcgcggcgccacgcctttttccgcagtcctcgccggatgcgaccgctggtggaccgcctggagccaggcgagctcattcccaacggccccttctccttttnnnnnnnnnnnnnnnnnnnnnnnnnnngtcccgggggcaactacgacttctttccgcaaggaccaccgtcctcgcaggcccagacaccagtggacctacccttcgtgccatcatctgggccttcagggacgccgctgggaggtctggaccacccgctgcctggccaccacccttccagcgaggcgcagcgattcaccgacatcttggcacatcccccaggggactcgcctagtcctgaacccagtctgcccgggcctctccactccatgtcagcggaggtcttcgggcccagtccacccttctcatctctgtcggtcaatggcggggccagctacgggaaccacctgtcccatcctcctgaaatgaacgaggcagccgtgtggtagcgggccttgcgtgggccacgggagctcgtggttgtacagagacgagcttttatttaaaaaaaaggaattc

SEQ ID NO: 7020 - DNA, 600 bp, Mesocricetus auratus
ctggcggccagcgctcccccacaagactccagctccaagtccccagagccctcggctgacgagtcaccggacaatgacaaggagaccccgggcggcgggggggacgcaggcaagaagcgaaagcgccgagtgctcttctccaaagcgcagacctacgagctggagcggcgcttccggcagcagaggtacctgtcggctccggagcgcgagcacctggccagcctcatccgcctcactcctacgcaggtcaagatctggttccagaaccatcgctacaagatgaagcgtgcccgggccgagaaaggtatggaggtgacacccctgccctcgccgcgctgtgtggccgtgccggtgttggtcagggacggcaaaccgtgccacgcgctcaaagcccaggacctggcagccgccactttccaggcaggcatccccttttccgcctacagcgcgcagtcgctccagcacatgcagtacaacgcccagtacagctcggccagcaccccccagtacccgacagcacaccccctggtccaggcccagcagtggacttggtgatcgccacctctccaagactcgaggccgtaggccctggccccaccc

SEQ ID NO: 7021 - DNA, 576 bp, Mesocricetus auratus; identical to SEQ ID NO: 3379

SEQ ID NO: 7022 - DNA, 600 bp, Cricetulus longicaudatus
cccccttctattccaatcatggccttgccatctctccgggtatgaagacacgtatccgaatgggacagtatgaatttcctaacccagaatggtcagaagtatcagaagaagtgaagatgcttatccggaatctgctgaaaacagagcccacccagaggatgaccatcacagaattcatgaaccacccctggatcatgcaatctacgaaggtccctcagactccactgcacaccagccgtgtcctgaaggaggacaaggaacggtgggaggatgtcaaggaggagatgaccagtgccttggccacgatgcgtgttgactatgagcagatcaagataaagaagatagaagacgcatccaaccctctgcttctgaagaggcggaagaaagctcgtgccgtggaggccgcagcccttgcccactgagccgctgtgtttcccaccccactggaggacaagcaataactctacatgaatatattttttaaacaaagagacacaagctgcccactgctgcctcctgtcctcctgggctatgtggagcccagatatcctctggctgattctgcccttggctctgacctccctggagaggagggttggg

SEQ ID NO: 7023 - DNA, 600 bp, Mesocricetus auratus
tatggtagtactgagaaacaggccttgcatgtgtaaagaacaagtaagaggaaaagaaagccttaatgatagatcgttcaagaaggttcacagaaaacgcccaaccttaggcctttaatatactttgttaccttgttaaagaagatttcattgctaccacaatcaaagagaacatggaatgcctcatctctggaaagtagatgtgacaacagattggagaatctatcatctaaagctgaagcgtttacaatcccttacagctaacgggctaccccctgagagtactgtcatacaaggtagcgccactgtctaagagatggaaatgtcacacaactgaagatgtaccagtgactgttctttgtggattttcaaatgcctctagaccagtggttctcaaccttcctaatgctgtgaccttttagtacagttcctcatttcgtgatgacttccaaccatagttattttcgttgccacttcacaaatgcaactttgactgttatgaatgtaaacatctgtgttttccgatggtcttaggcaacgactcctgtgaaagggtcatttgaccccttggaacctactggttgagagccactgctctag

SEQ ID NO: 7024 - DNA, 600 bp, Mesocricetus auratus
acatacctacttagttataaacaaatatatatacctaaaaatgtaaaccaaaactcaaataattgactcaagttagttcacatcatgtataatattagatatggtgatcatagtcattattataatacctcttacaggaagtctttactgtcacattgaattcttataccaacccccaagttaagataagaatttgggctttgggggtacagtcagtgtcagaaggactcatggtttgtaaacagcagagctagagttcactcatccctgagctggcccataccacatcatccaccctgttgatttgtgtagctctaagacaatgaattacctaccacattctttgaattccacttaatttaaacattgagcagaaaagaaaagctgtttggagtcagggtctcagtggtagagtgcttacccatcaggtgagagattggagtttcaaactcccaccacaccccccaccctcctgctgccccaatcttcaaaaatcaaaaaaggaaataacagctttaaatgatgatagtctttttactgtagataacttaattacagaaatagctgttaattttaggttttattaatatttataagcca

SEQ ID NO: 7025 - DNA, 382 bp, Phodopus sungorus; identical to SEQ ID NO: 3383

SEQ ID NO: 7026 - DNA, 397 bp, Mesocricetus auratus
atgcttgttcataacaagttggtggaccccctgtatagtatcaaggagaaggaaattcagaaaagccaggctgctaagaagccatacagcgactagcctgtgccaagtcacgagtacctccgagcgagacaggcaggtctttctggaaactgtaagagagtaggattacttcgcttcagttcactgtggttgctgcagacccttttggctaggaacatactggctgtggggaacattgagtttagctatggagaacagtgtttataacttttacctttttcagtcctggggtttgaacctagggccttgcacatgccaggcaagtgctctactgagctatgtctccaacttgtttacaatgtgatattttctattaaatctaatattttcaaaaaaa

SEQ ID NO: 7027 - DNA, 694 bp, Mesocricetus auratus; identical to SEQ ID NO: 3385

SEQ ID NO: 7028 - DNA, 506 bp, Mesocricetus auratus; identical to SEQ ID NO: 3386
  misc_feature (78)..(97): n is a, c, g, or t

SEQ ID NO: 7029 - DNA, 600 bp, Cricetulus griseus
  misc_feature (291)..(377): n is a, c, g, or t
acatatcatacacagacacatacacaaataattttaaaaatctttaaaagtgttaaaggagacctaaatatgctcttaaaacacagatcacatcaggaatgaaatccactcctggtgtctgaaataattgtctttactgacctttccagcaggaaaaatgttcatctcatagcaggtaatttttcttttaggggtggggctctgtcaactttgaatgcattggaaatgtagagttttctggccttggcagaaattataaaagtgaaacaacagatgaaaacaaaacttttnnnnnnnnnnnnnnnnnnnnnnnnnnnnnnnnnnnnnnnnnnnnnnnnnnnnnnnnnnnnnnnnnnnnnnnnnnnnnnnnnnnnnnnctgtctcaacaaaaccaaacacctaagactaaaagcaaaccaaaccacagcagcaacaaaaaaaaaccctataaaacaaacaagggaacttcagctgcaatacaattaaaaagaatatttgttaagtacaggacctagaccttcaaaatagcgcttttggtacacagtgagctaaacacagtcgaggtagcaaagattataatcgtgcggcaaagacaagctt

SEQ ID NO: 7030 - DNA, 600 bp, Cricetulus griseus
tgtttgtttttctgtgtggcttattttgtgtatagccttctgtctagctctaactccagcatttagttcagaatgtctaaaatggattggctaggagccagtgagagtcaggaggggaagtagagctgctttggatctctgggcgcacctgctacagtctgaggccagatacagatgggccctcctacctgctcagagtcaggggttagggagtgggggcckgccagtctctgtgggctcccagccaagccctccatcacacaggcttacctattctgaggcaggaggcccctagtgcctctccacccaacagcagctgtggcaagcatctgcagcctacacaggaagtaccctgtgctgtccagggcctgtctgcttcccttctttacaggcacagcaggcaaagaggtgcactgcaaattgcaccatagacttggggtagaaagtgaattgctagagataaactaaaatacaagcagctccagctccagctccttacaacacaatctaacagtgatgtctgtcaccatgcctgccatctttacgtcagaatccccaagggagagatctggaaagagtattgtagacaggctatctaga

SEQ ID NO: 7031 - DNA, 600 bp, Cricetulus griseus
gggccaagccaggccaaccctggccggggtggcgcccacgtggcgttaaggaaacagggaaaatggtgggggtgtggccagagggccgggggcgtggccgaaacggggsgtgaccgcagacttggcggggcctggggcaagcgaggttggcgcgcagccgggaaggtttaggcggggtcgcacctgttgcgcgactgccccacggccccgccacgggattgggatctctaattgattcccagaaactagtgaaagaaccctaggcgaattccgggttcggttttctgtggagcacgtggcctgcttcctcttgagtgcgggctgggggtcgcgacaccggggtctcctgaggtcagtctggcagctgaagcccgtgggagtccgccttcgtccagctggccattttgagaagcagccttccttcccgcctcagtgcgggtgcaggggccaggggcgcgacttcgcccctgtgggccctctcctctcctcagccgcgcttccccgcggtgtagactaggcagcctccctggtaccactcgggactcgggcagtatggcctcaggtaagcgtgtggcgcgtgtgttggcgttagagggatcc

SEQ ID NO: 7032 - DNA, 600 bp, Cricetulus griseus
  misc_feature (450)..(491): n is a, c, g, or t
agtgtggctagtacagtttaaagaatgtgtggccaagaatcgtaagacccaggctccagtactggttctgcttagcacagtagaaatttttctgtagcaaaattcccctcgcctatataatgaaggtcacttccttacctacttcacagggccattctcaagagcacaaatctaactgaagggaaagcacatggaagctgctgtggttggcggcaaccgatgtactatcacacttggttattagaataaactatctcaaagtgtatcagcaaaacttccttacattgatcgataaactattaaaaattaaaccctgccccctgggtttttactagcagatcaatatgcctctgctcagagacccgcatcactggagaaagcatgtgagtcctgcctcatttcttagggcattcattcagaaatgaccgtctttattatcccactctcccnnnnnnnnnnnnnnnnnnnnnnnnnnnnnnnnnnnnnnnnnntatactgttaagtagtgtctggctgaacttgagggcatcagcataccccccacttaagacgttaccaccgccacttctgtaggatttgaacaagcaagcaatctgaatt

SEQ ID NO: 7033 - DNA, 541 bp, Cricetulus aureus
tgctagtgagctgtcgaggctgtctgtcaacagtgtgactgctggagactactctcggccccttcacatctctactttcatcaatgagctggattcaggtttccgccttctcaatctgaaaaacgactccctgaggaagcgctacgacggcttgaagtacgatgtgaagaaagtagaggaggtggtctatgatctttccatccgaggcttcaataaggagacagcagcagcttgtggtgaaaaataggagcctctccctgtggctggccttgccgactaggcatttgccagggagggctagcacagtgcctctcctctagttagcacgccagttgctaaacactgcgctttattttcgtaaccagctgtgtggcgtgaatatcagaattgagatactttttggatctaaaaaaaaaaaatcctttccactgataggattttctttgttgacgtttcagtgaacttgctgtgtaatttgttgtagtatcattttgtcaaaagtgtaaatgttggtctcttggtaaaagtccttttcttgctt

SEQ ID NO: 7034 - DNA, 369 bp, Mesocricetus auratus; identical to SEQ ID NO: 3392

SEQ ID NO: 7035 - DNA, 308 bp, Phodopus sungorus; identical to SEQ ID NO: 3393

SEQ ID NO: 7036 - DNA, 600 bp, Cricetulus griseus
  misc_feature (182)..(197): n is a, c, g, or t
acaatcctatacgagtagtcaacccagatattgttgttgcaaaattgcgtcctggccaggaaatcgatttagaagctcatgcaatcttaggtattggacaagaccatgctaagttttctcctgttgctactgcctcctaccgcttattgcctactatacatatcttgtctcctattgaaggnnnnnnnnnnnnnnnntttcaaaaatgcttccctaaaggagtcatcgagcttgaggaaggacctgatggtaaaaaacaagcccgtgtagcagacgttcgaaaagacaccgtatcccgcgaatgcttgagacatcccgaatttgcagataaggtgcaattaggccgcgtacgcgatcattatttgttttctgttgaaagcaccggtattatgaagcccgatgtcttgttcattaaaagcattgcagtcctaaaatcgaaatgtctagccgtaaagtctagtcttcagaatattttttctgactgaatgtctgttaaattagttttatatgtaatcttttggataattgggtacgctgttaaaaaatatacttttgaaagttattgatttttatatttcaatattaacattttgtcctttc

SEQ ID NO: 7037 - DNA, 600 bp, Phodopus sungorus
  misc_feature (159)..(177): n is a, c, g, or t
atctgggacaagaccatcccctatgatggcgagtctttccacctggagtacatggacctggatgagttcctgctggagaatggcatccctgccagccccacccacctggcccagaatctgctgctgcctgtggcagagcttgaagggaaggagtctgcnnnnnnnnnnnnnnnnnnnccaccatcctcctctactgctgtctttcagccctcggaaaccgtgtccagcacagaatcatccttggaaaaggagagggagactccaagtcccattgaccccaactgtgtggaggttgatgtgaacttcaatcctgaccctgctgacctggtcctctccagtgtgccaggtggggagcttttcaaccctcggaaacacaagtttgcagaggaagacctgaaaccccagcccatgattaaaaaagccaagaaagtcttcgttcctgatgagcagaaggatgaaaagtattggacaagacgcaagaagaacaatgtggcagcaaaacgctcccgggatgccaggcgcctgaaagagaaccagattaccatccgggcagccttcctggagaaggagaacacagccctgcggacggaggtggctgac

SEQ ID NO: 7038 - DNA, 600 bp, Cricetulus griseus
acaccattggtggggtgaagattaactttcccttgtaaagcttatccagcacagcttgctatgatgaactttattgtcagaggactaaacagtagtcagcattgtttgttggagagtcccacaggaagtggaaaaagtttagccttactttgttttgcattggcatggcaacaattttctactggaaagccggtggatgagggcttgaataaaaagcttgaggtgccatcatcatgctgttgtgcatgccattcaaagagctttatgtacagcaacacggacatgggtacttcccctcatttcagtagtccaagcaaactgtctgagagaaatggcttttcaccaccctgtcaagattctcctgaaaaaaatactctggctgcaaagttatctgccaagaaacaggcatctaaacacagagatgaagatgatgattttcaaatggagaagaaaagaatccgacccttagaaactgcacagcagatgagaaaacgtcattgtttggaaaaggatgtccaccatttggatgcacgggtagcttcggaaaagaaagtaaaacctgagtctcctgtaggaaagacaagctcctctttccaaaat

SEQ ID NO: 7039 - DNA, 1379 bp, Cricetulus griseus
  misc_feature (1163)..(1224): n is a, c, g, or t
tgtggtggggtcatacttgtacaatggaaaccagcacaagctacaaaagttgtggtagagcagagtccattattaggctttggtgcaatagctattgctgtattgtgctctggatttgcaggagtttattttgaaaaagttttaaagagttcagatacttccctttgggtgagaaacattcaaatgtatctgtcagggatcgtggtgacgttagttggtacctacttatcagatggagctgaaataaaagaaaaaggatttttctatggttacacgtattatgtctggtttgtcatcttccttgctagtgttggaggcctctacacttctgttgtggtcaagtacacagacaacatcatgaaaggcttctcagcagctgcagccattgttctttctaccattgcttcagtgatgctgtttggattacagataacactttcctttgcaatgggagctcttcttgtatgcatttccatatatctctatgggttacccaggcaagacactacctgcattcaacaagaagcaacttcaaaagaaagagtcattggtgtgtgattggaatcttaagatactcctataacgactaaactgtcaataataaattagagccttaagtcaaccccagatggtagcttaaacaatatcaacaaaattactgtatggcattaaggtacagagaactgtatgagtgaatgcttaacagatttatttagagtgtttggtatcaagctgtattatttcagaatgaaggactttactacagagagagagtgtgtgtgcatgtgtgtatgtatactgtgtacacagagcatggagtttacatggtatcaagaggcatgcacagaggagacaacacagggttacaacatcaggtgaaactacaatattcaatcaaggtttaagatttggtatctgaaggttcaagtgccaaagccatttctgtcacactgttctctcgttcaggtaccaggaggggaagcttagccttccttgttgtccagttcatggatagtactttgtccctgtagtagcaaaaaatctagctgcttttatcaaagtgaagaatgaataagataagacagttcagaacaaaaccagtgtgtaacttctaaaacagaacctatttcatggctcagacactgacttctgtcgtttgaatnnnnnnnnnnnnnnnnnnnnnnnnnnnnnnnnnnnnnnnnnnnnnnnnnnnnnnnnnnnnnnagctgatatacttttcagaaaattttctaagtcgcttttatactttcttttttataaagtatggttacctgttgggctctcaatttgtgaactttaagtgatttaaaatatttctataatgttaacggggaaatccagcaataaatttatttata

SEQ ID NO: 7040 - DNA, 1378 bp, Cricetulus griseus
  misc_feature (631)..(653): n is a, c, g, or t
tgtgcccagtgtggaaaaacaaagtgcatgatgaagtcttcagactgtgtcatcaagcatgctggtgtatacagtactggccttgctatggtgggtgcaatatgtgacttctgtgaagcttgggtttgccatgggaggaagtgtcttagtacccatgcctgtgcctgcccactcactgatgcagagtgtgtggaatgtgagcgaggggtttgggaccatgggggcagaatattcagctgttcattttgccataattttctttgtgaagatgatcagtttgagcatcaagccagctgccaagttttagaagcagaaacatttaaatgtgtttcctgcaaccgccttggccagcattcatgtctgcggtgtaaggcttgtttctgtgatgaacatacaaggagcaaggtgtttaaacaagaaaaagggaaacaacctccttgcccaaaatgtggacatgaaactcaggagacaaaggatctcagcatgtcaactcgctccttgaaatttggcaggcagactggaggtgaagagggagatggagcctctgggtatgatgcttactggaagaacctgtcatctgacgagtatgctgatactgggtaccatgatgatgaagaggaggatgaagcannnnnnnnnnnnnnnnnnnnnnntgggaaggattcagatgctgagtcatcagatctgttcactagtttgaacttaggaaggacctatgccagtggctatgctcactatgaggagcaggagaactaggagcagctcccgctggcacttgaagaagagcaggctgaatcatgaggatgctcagacgtcccctcccttggccttgtccaaaaggctagtcatactagggtacattctggcggtttgtaggaactgatactggacttctagtgtaaggaaaatgggttaaatgtaatggagtatcatgaattggattattactgatttcaatcatctggtaggttttgtcagttagatacatataaaatacatgataaaggaatagaaaggaaatatatttatttgaaattaaattgctgtttttattaaaagcactgcttataacttgcatgtatctgattttacaaagagtaacgggtaaaattactgtattcttttatttcaatccatacaatgatagtcatgttatattctgaattttcactgactatttatgctgtcttaagtagtcgtatctgtgttaagtggttgacgtgttcatctttttcttacaatgtatgtcctcaccagtgcttgttaatgcctcactgactgacagaaatctagctgttttcatacacataatgccaggactagtattgctgatgcttcacccagagaacttcacttttaaaataaatctactataaac

SEQ ID NO: 7041 - DNA, 538 bp, Cricetulus griseus
gaggactgatgaagatgctgttctgatggatggaatgactgaatctgatactgcctcagttaatgaaaatgggctagtcacagttgcagattatatttctagagctgagtctcagagcagacaaagaaacctcccaagggaaactttggctaaaaacaagaaagaaatggcaaaagatgtgattgaagagcatggtccttcagaaaaggcaataaatggtccaactagcgcttctggcgatgaaattcctaacgtaccgcgtactccaggagaagaaaagactaagaacttaaaagaagaaagcactcaagaagcagcagtcctgaatggtgtttcataactgaaggaagttcctagtttacagttcttttacattacagttacaatagtgcttgtacaagcttgccaaagatagaatatggatcgccagtctttacatcgcactttcagttcctccatttggaattcagaaaggggagggatcctgaagaaatcatatgttaaacatactttgacacctactgtgttaaaaatatat

SEQ ID NO: 7042 - DNA, 600 bp, Mesocricetus auratus
tggagaagtcttcatttgttcatgtctaatgcagaatctaacctgaccaatgacacccaagaatcaagtgacctagccactttccttggaggggggcagtagaaggagctcagtgacattttagagtccttggtctttgtctaccttgtattcctgaggagccaccaccctctggtttgccaaagttggcaagtctacagttgcttcctggaacctggagtacccagtgcttgacttcaaaaagaggacacagatgtccagattcccacaacctctgacttgggctcccccccactgcctggacaccccaaaagtggcctgttgttgagctcagtttcaatgggaacagaaactgggtttaaggaaagagattatttacttattccacagagaagataaccaagtaaatagtgcaatatcctaagtggtacccaagccctgcctactacctcttgtgggcttcctagaacatataaaaagccacctgatgcccccacacttatacacactactataccaccccacatccagagacagccaagcctcccagactccaccatgaagattgccatcacaatggctgttgtcatgctgtcggtc

SEQ ID NO: 7043 - DNA, 579 bp, Cricetulus griseus
atggcactggatctttaaagcgcagtggctcctttagcaaactccgggcttccattagacgcagcagtgagaagctggttaggaagctgaagggaggaagtgcacgggacagtgagccgaggaaccctggggcgtccccagcagagcctctttgtgtggaaaacgtacagcagcagcctagaagacgctagcactaactgacctgagcctggcctgctctaaacaccatgatgctgctgagtatggctccagagctggccctgtgaaggccatggtggggctgggagggcctgcggctgggagcccagtgctaacttagtccccctgccctcgtgctgcgcgaccactactaataaccactaccactaggagggttttggagagcagctctcacgcagtaaggtggtgacctgcccctgtccttcctgggaggccccgggacaggacacatcggctcctgctgcttctgcctggccgtcctgtggcactcctcatgtgtttagttctctgtgttgtgtgtgataatgtattttattgttacatttttaaattaaaagttatatgccttttacgtttacc

SEQ ID NO: 7044 - DNA, 577 bp, Cricetulus griseus
  misc_feature (125)..(154): n is a, c, g, or t
ctgcggaagccctttggtgactttatggagcccaagtttgagtttgctgtgaagttcaatgcactggaattagatgacagtgacttggccatatttatagctgtcattattctcagtggagaccnnnnnnnnnnnnnnnnnnnnnnnnnnnnnnaggacattcaagacaacctgctgcaggccctggagctccagctcaagctgaaccacccagagtcctcacagctgttcgccaaggtgctccagaagatgacagacctcaggcagatcgtcacagaacatgtgcagctattgcatgtgatcaagaagacggagacggacatgagccttcaccccctgctccaggagatctacaaggatctatattagcataaaaaaaccctcccccccaccccccggctgacgtgctccctctttcaattgcactattactctggaggggaaaatctgacaattaagaaatttactgtgaaaaagcattttaaaaacaaaaggttttagaacatgatctattttatgcatattgtttataaagatacatttacaatttacttttaatattaaaaattaccacatt

SEQ ID NO: 7045 - DNA, 238 bp, Mesocricetus auratus
  misc_feature (55)..(55): n is a, c, g, or t
  misc_feature (88)..(88): n is a, c, g, or t
  misc_feature (109)..(109): n is a, c, g, or t
  misc_feature (124)..(124): n is a, c, g, or t
  misc_feature (130)..(131): n is a, c, g, or t
  misc_feature (192)..(192): n is a, c, g, or t
  misc_feature (198)..(198): n is a, c, g, or t
cctgaggtctagaggaagggcctccgctgtacacataacacatggcctggctaancccattggttgcataaaactgtctgtgttagtncaggcacgggtgtcctaggtncttcacaaccctgtncactgnncagcagggtacaggctggcaggaatattcagttagctctctttataatttgaattctcttncttttngagtactttctgttaatctctccccaacaattactgacct

SEQ ID NO: 7046 - DNA, 1400 bp, Cricetulus griseus
  misc_feature (264)..(283): n is a, c, g, or t
ccttcttaacatgtacattgagactgagggaaaaatgataatgcaggacaaactggagaaggagagaaacgacgctaaaaacgcagtggaagagtgtgtatatgagttcagggacaagctgtgtggaccatatgagaaattcatatgccaacaggaacatgaaaagttcctgaggcttcttacagagacagaagactggctgtatgaggaaggagaggaccaggctaagcaagcatatatcgacaagttggaagagttgatgannnnnnnnnnnnnnnnnnnngttcgatttcaagaagccgaggaacggccgaaagtattggaggagctggggcagcggctgcagcactatgccaagattgcagcagacttcagaagcaaggatgagaaatacaaccacattgatgaatcagaaatgaagaaggttgagaagtctgttaatgaggtgatggagtggatgaataatgtcatgaacgctcaggctaaaaggagtcttgaccaggaccctgttgtgcgcactcatgaaatacgagcgaaggtcaaggaattgaacaatgtttgcgaaccagttgtaaatcaacccaaaccaaaaattgagtcacctaaactggagagaactccaaatggtccaaatcttgacaagaaagaagatttagaaggcaaagataattttggtgctgaagctccacatcagaacggtgaatgccaccctaacgaaaagggctctgtcaatatggacctggactaggcgctgctggcttcctcctccagttcatgaaatgtgtttgccatagtatgtgattctgtacaacagactttgtcgtctatttatattttcttttcttttttttaaaagactgtctataaattttgtgtattatatgggaaaaaaggaaaagcctgagtctgtagtctttgaccctaaggagaatagccttggtgacagagtcgtgtggctgtgtgacccacactgagtactctacagtattgccacttggactgctgaggagtttgagtttgtcttttgaggagacaactcatcttgcttgttcaaatgctctgtgatgagacttttggagcagttgttctcctgcaaggctgtttcttttgcattttgctctccatttccgcatgtgtgtggctgtgggtgtttataatgagactaagtctgatttgcataagggctttcaaaaattaagtctgtcccgtagattttgctttcattattacaaattcaacgagtacaacacagctaatgaattgtagcagcatgcaaagcaaggctgtaactatcaccatacagtgcactgtcccgtgagtgtgacacgggcaaatatatgaatcatgtgaccattgtgactgccccatgagctttaaaataaagttcacccagtggtgtc

SEQ ID NO: 7047 - DNA, 440 bp, Mesocricetus auratus; identical to SEQ ID NO: 3405

SEQ ID NO: 7048 - DNA, 600 bp, Cricetulus griseus
agaaaaggcaaggcaagtgttttctgagatggatggtggtgctaaacagttactttccacattgtctctggaaagtcatgaacaatcagaccattctgggagaagagaaaactctgtgacacataaccctgaggatgtattgtcactcccaaaaacctttgcaagcaatgccaattcatctgtattctctggatttagtacagcaggtggtaaacgggtcacagtttcagaaagtgccttacacaaagttaagggaatgttagaggaatttgatttgatcggaactgaacatactctccagtgtccacctacatctgaaggtgtatcaaaaatacttcctcaatattgtgttgaaaagagaaccccagaataccctataaactctaaattgcagaaaacctatgatgataaattcagtttaccaaacaactataaagaaagtgcttctttggggaatactcattctcttgaagcttctccccaactctctcagtttaagcaagacacacggttggtattaggaaccaaagtatcccttctggaaaaagaacaaaccttccctcaaaatataaaaacagaaagtggtgtaatggaaactag

SEQ ID NO: 7049 - DNA, 211 bp, Mesocricetus auratus; identical to SEQ ID NO: 3407

SEQ ID NO: 7050 - DNA, 159 bp, Mesocricetus auratus; identical to SEQ ID NO: 3408

SEQ ID NO: 7051 - DNA, 239 bp, Mesocricetus auratus; identical to SEQ ID NO: 3409
  misc_feature (120)..(122): n is a, c, g, or t

SEQ ID NO: 7052 - DNA, 99 bp, Mesocricetus auratus; identical to SEQ ID NO: 3410
  misc_feature (47)..(47): n is a, c, g, or t
  misc_feature (52)..(54): n is a, c, g, or t

SEQ ID NO: 7053 - DNA, 189 bp, Mesocricetus auratus; identical to SEQ ID NO: 3411

SEQ ID NO: 7054 - DNA, 71 bp, Mesocricetus auratus
gatctgtgattagtctgggggtgtcgggagtgatggggagaactcttgggggaaggtgcatgactaccgca

SEQ ID NO: 7055 - DNA, 98 bp, Mesocricetus auratus; identical to SEQ ID NO: 3413

SEQ ID NO: 7056 - DNA, 141 bp, Mesocricetus auratus
  misc_feature (28)..(28): n is a, c, g, or t
  misc_feature (33)..(33): n is a, c, g, or t
  misc_feature (64)..(64): n is a, c, g, or t
  misc_feature (82)..(82): n is a, c, g, or t
ggccataatgtactcactataggcgaantcganctcggtaccaagaccattgacaagaaacaanagcacttcatgctgaagncctagagagactagggaaacaagggacatacttcagtgtaatactggcaattaactccg

SEQ ID NO: 7057 - DNA, 100 bp, Mesocricetus auratus; identical to SEQ ID NO: 3415

SEQ ID NO: 7058 - DNA, 179 bp, Mesocricetus auratus; identical to SEQ ID NO: 3416

SEQ ID NO: 7059 - DNA, 230 bp, Mesocricetus auratus; identical to SEQ ID NO: 3417

SEQ ID NO: 7060 - DNA, 114 bp, Mesocricetus auratus
gccagtgttgtttctcaattatgcttcactttatttttgagtcattgtctcattgaatatggaggttcctgtttcagatagatgagctggccaagaagccttaacaaccctcct

SEQ ID NO: 7061 - DNA, 143 bp, Mesocricetus auratus; identical to SEQ ID NO: 3419

SEQ ID NO: 7062 - DNA, 600 bp, Mesocricetus auratus
catcctgagtcggccctccatgccggtggcctcgggggccgccctcccttccgcctcgccctcggggtcgtcttcctcctcctcgtcgtccgcctccgccacctcggcctctgcggccgccgaaaagcacaagtcgagcagcggcggcctcctgctgcacgcgtccgaggccgagggctcgtcctgagcgccgcccgcccgcccgcccgcccgctgctgcgggatcccgggccgccccgaccgcgcccctcagccggtcacccccgggcccagcaccgcggctgctccccgggcctttactattttctaagatgtacatatctatttttttaacccagaaatcgtggcggggcctggggggataggacggcgcgttgacgagaaggaagggagcccgccgagtgcgccgcgttaaatgacgaacccgcatccccgcggctcccctggacccttcccacccgcggtgtcagtcaatccccacccccatccaggctcggtcccttgctctgtggtccctgagctccggggttcgtgtttgtgaagagtcgacagccagcgcctggtgggaatctccgagccacacagggcatctgccaccta

SEQ ID NO: 7063 - DNA, 316 bp, Cricetulus griseus
  misc_feature (28)..(110): n is a, c, g, or t
tccgactacaacatccagaaggagtctnnnnnnnnnnnnnnnnnnnnnnnnnnnnnnnnnnnnnnnnnnnnnnnnnnnnnnnnnnnnnnnnnnnnnnnnnnnnnnnnnnntgagcccagtaacaccatcaagaaaagcaaacaggaagatggacgcacctttctcactacactgtctagaaagagcacaccttgtgcttgttcttgggcttgaggggaggtgttttaatttaccccatcttttaagttgttaacaagtttcattgcactttgaataaagttcttgcattcccaaaggtgttggatctcgttttagc

SEQ ID NO: 7064 - DNA, 111 bp, Mesocricetus auratus; identical to SEQ ID NO: 3422

SEQ ID NO: 7065 - DNA, 503 bp, Cricetulus sp.
aagcttttaccgccaagaggatcccagagaagaggctggagagctacaagagaatcaccagcagcaagtgtcccaaagaagctgtgattttcatcaccaagctcaagagagagatctgtgctgaccccaagcaggactgggtccagacatacacaaaaaaactggaccagagccaagctaaatcagaagctgcaactgtgtataaaacagcacctttgaatgctaacttgacccatgagtctgcagttaatgcatccactactgcctttcccaccacagacttgagaayttctgtaagagtgaccagtatgacagtgaactagtgtgacctggaatgtgatgccttaagtaatattaactttatttaacttattaatgtttcaatatccccctccctgtatacttggatttcttagatgcatgacgtggtttcattgttttccctctgtgaaccctggttctccaccctaaatgttatgagagatgacttttgtaaagatgag

SEQ ID NO: 7066 - DNA, 600 bp, Cricetulus griseus
  misc_feature (100)..(327): n is a, c, g, or t
gataaccgtggcttcatggtgactcgctcctatactgtgggtgttacaatgatgcaccggacaggtctctacaactactatgatgatgagaaggagaagnnnnnnnnnnnnnnnnnnnnnnnnnnnnnnnnnnnnnnnnnnnnnnnnnnnnnnnnnnnnnnnnnnnnnnnnnnnnnnnnnnnnnnnnnnnnnnnnnnnnnnnnnnnnnnnnnnnnnnnnnnnnnnnnnnnnnnnnnnnnnnnnnnnnnnnnnnnnnnnnnnnnnnnnnnnnnnnnnnnnnnnnnnnnnnnnnnnnnnnnnnnnnnnnnnnnnnnnnnnnnnnnnnnngccattgacaagaacaaggcagatttatcacgcatgtctggcaagaaggacctgtacctagccagtgtgttccatgccactgcctttgagtgggacacggatggcaacccctttgatcaagacatctacgggcgtgaggagctgcgaagccccaagctgttctatgctgaccaccccttcatcttcctggtgcgagataatcagagcggctcgttgctgttcattgggcgcctggtccggcccaagggagacaagatgcgagatgagttgtag

SEQ ID NO: 7067 - DNA, 606 bp, Cricetulus griseus; identical to SEQ ID NO: 3425
  misc_feature (407)..(425): n is a, c, g, or t

SEQ ID NO: 7068 - DNA, 1380 bp, Cricetulus griseus
aaaagagaaaaaaaggatattgtgaatgttgcttacagaaatacgaagatcttgaaactcaccttttgagtgagaaacacaaaaacttcgcacagagtaaccagtatcaagttgttgatgatattgtatctaagttagtttttgattttgtggaatatgagagagacacacctaaaaagaaaagaataaaatacagcgttggctccttttcttctgtttctgcaaatgtcctgaaaaacactgaaccaaaggagaagctacagttggagcccattttccagaaggacatggtagaaagtaatggacaactgcctgaggagatttttcagtgtgaagatatccagtgtgaagatatccagaaacctgaacaaaggcttgtgttggcttcagaacccatgtcctactcttcaacgggattgaaaggacgtgatgagaaagcagccagcatgttaaatgccagtgaacctgacataaaacagaagtttacacagctacctccatgtaaaaatgaacaggaaggaattcttgatgtttctgaacataaattaattattaatagaaatgatttagaacagagggttggtgactctgtaggtgtgccacggtcatgtgtacaagtttctcatctcagtccagaaaatagtctaccccaaccaaaattaacagcagatactacacatttttcagcaaaagatttacaagaaaaggaccttcattttgtgtttggtcatgattctgatctggtgacattaaatacatcaaaagaacagctaacagtgaaggccggaacgccatcctgtggtcctcagcagcccaatgagtgtgacacggagaatacagataacttgccttgtggtaagatccagcggaaagtgagactgttattagggcagaagaaaaaaaatgtggacccaagtgctgaattggataaaaaaagaactgagtttcttcctatgtgtgaagacagaacttgtgggtcaccagtacagtctctactggacctttttcaaacaagcggggagaaatcagattttttggggtttaccagctacactgaaaacagtgggctatgtgatgttttagatgtttgggaggatgaaaattcaagtagtctgctctcaacatttttctcttccccttcagcttctacattcattggattttagtatttaatgtgtttttcagaagtgacagttttattcttggaatttttataaatacatatataattcttaggagtctgctttttggttttggtttgttctttgccagctttgttgctagaaccatatgtaaatactaagatgatgtttataattttttacagaattgagtagctgttacaaattatacaataaaatcttgtgatttattttacat

SEQ ID NO: 7069 - DNA, 391 bp, Cricetulus griseus; identical to SEQ ID NO: 3427

SEQ ID NO: 7070 - DNA, 1400 bp, Mesocricetus auratus
  misc_feature (438)..(458): n is a, c, g, or t
aactacagaacaatgtgctaagcagtgctaaattgttctcatgaagaaaacagtcactgcatttatctctgtaggccttttttcagagaggccttgtctagatttttgccagctaggctactgcatgtcttagtgtcaggccttaggaaagtgccacgctctgcactaaagatatcagagctcttggtgttacttagacaagagtatgagcaagtcggacctctcagagtgtgggaacacagttttgaaagaaaaaccatttctctaagccaattttctttaaagacattttaacttatttagctgagttctagatttttcgggtaaactatcaaatctgtatatgttgtaataaagtgtcttatgctaggagtttattcaaagtgtttaagtaataaaaggactcaaatttacactgataaaatactctagcttggnnnnnnnnnnnnnnnnnnnnntagcgttgtccaggaaaccctgcttgcttgccaagcctaatgaagggaaagtcagctttcagagccaatgatggaggccacatgaatggccctggagctgtgtgccttgttctgtggccaggagcttggtgactgaatcatttacgggctcctttgatggacccataaaagctcttagcttcctcagggggtcagcagagttgttgaatcttaattttttttttaatgtaccagttttgtataaataataataaagagctccttattttgtattctatctaatgcttcgagttcagtcttgggaagctgacatctcatgtagaagatggactctgaaagacattccaagagtgcagcggcatcatgggagcctcttagtgattgtgtgtcagtattattgtggaagattgactttgcttttgtatgtgaagtttcagattgctcctcttgtgactttttagccagtaacattttatttacctgagcttgtcatggaagtggcagtgaaaagtattgagtattcatgctggtgactgtaaccaatgtcatcttgctaaaaactcatgttttgtacaattactaaattgtatacattttgttatagaatactttttccagttgagtaaattatgaaaggaagttaacattaacaggtgtaagcggtggcttttttaaaatgaaggattaaccctaagcccgagacccagaagctagcaaagtctggcagagtggtaaactgtcctgctggggccatccaatcatctctctccattacactttctaactttgcagcattggtgctggccagtgtattgtttcattgatcttccttacgcttagagggtttgattggttcagatctataatctcagccacattgtcttggtatcagctggagagagttaagaggaagggaaaataaagttcagatagccaaaacac

SEQ ID NO: 7071 - DNA, 77 bp, Mesocricetus auratus; identical to SEQ ID NO: 3429

SEQ ID NO: 7072 - DNA, 141 bp, Cricetulus griseus; identical to SEQ ID NO: 3430

SEQ ID NO: 7073 - DNA, 600 bp, Cricetulus griseus
taccccaactagtccttcttacagtcccagctctccagagtataccccaacctctcccaaatactcacctacaagccctaaatattcacctacttctcccaagtattctcctaccagtcccacctactcacctaccacaccaaaatactcgccaacctctcctacatactcgccaacctctccagtctacaccccaacctcccccaagtactcacccaccagccccacctactcccccacctctcccaagtactcacccaccagccccacctactcccccacctcccccaagggctccacttactcccccacctcccctggttactcacctactagccccacctacagcctcaccagcccagccatcagccctgatgacagtgatgaggaaaactaagggtgagcagggcgcagcagcagcaggttagggtcagacagccttagtggcctgtgcagtcacttcccttgagctgtgaccctagcctgggccccttgtacataactccttgtgacagaaccctctggaggttctagatcccatttttgatgggcttttcgtcttgtcctcactcgtgctgtcttgggactcactgacagctg

SEQ ID NO: 7074 - DNA, 600 bp, Cricetulus sp.
caggaggtgctgtcctcggatgaaaatgggggtccctatagctcatcccttggaaacgaagagggggagtcaaaaaccttcactaccctagaccctgcatccctagcttggctgactgaggagccggggccagcagaggtcacaagcagctcccagagcccccgctctccagattccagtcagagctgtatggctcaggaggaagaggaagatcaaggacgaaccaggaaacggaaacagagtggtcagtgcccagcccggggcactgggaagcagcgcatgaaggagaaagaacaggagaacgagaggaaagtggctcagctagctgaggagaacgagcggctcaagcaggaaatcgagcgcctgaccagagaggtagaggccactcgtccgggctctgatcgaccgcatgtaaatctgcaacaagtatgaacaattgggactatcattccccaacttgagtgacctcctgtctctcctggaccatcatgtcaatgccaaggatgctgggtagggagaacaaaggtctcagctagtgtgtatatatattgtacattctttattattttattgtctgtacccggtaaagtgactttgtat

SEQ ID NO: 7075 - DNA, 1400 bp, Cricetulus griseus
agcaagcagcaggtgcaggttgtgggacttcaggagtacctggttaactgtgctgatgatgtcatcaagatgctcaacatgggcagtgcctgcaggacttctggacagacttttgccaactccaattcttcccgctcccatgcctgcttccagattcttcttcgagccaaagggagattgcatggcaaattctccttggtggatctggcagggaatgaacgaggggctgacacttctagtgctgaccgccagactcgcatggagggtgcagagattaacaagtctctcctagcactgaaggagtgcatcagggcgctgggacagaacaaggctcacaccccattccgtgagagcaagctgactcaggtgctaagggattcattcattggggagaactcgaggacttgcatgattgccatgatctcaccaggcataagctcctgtgaatatactttaaacacgctgagatatgcagacagagtcaaggagctgagcccccacagcgggctcagtggagagcagccaattcaaatggaaacggaagagatggaagccagctctaatgggacctcgctggcagtcaatttcaaggaagaagaggagctgtcttcccagatgtccagctttaatgaagccatgagtcaaatcagggagctggaagagagggccatggaggagctcagggagatcatacagcaaggaccaggctggcttgagctctctgagatgactgatcagccagactatgacttagagacctttgtgaacaaagcagaatctgccctgactcagcagactaagcacttctcagccctgcgagaagtcatcaaggccctgcgtgtggccatgcaactggaagaacaggctagcaaacagatgaacagcaagaaacggcaccaatgatgacttcaataaagatctgtttatgtcacaccagcctcttcccctatccagcaaactttgggcaccttctggctttggttagggactgagttggatgggttttggtaaatgccaggtaaggggcatcaggcccaggaagactcggagagagaattgctgttctcttgcttagtttggagcaggaggaaggagcttttcatgactgcttccccttttcctccctatcagagggggtgctgtttgggtagtctccctgcggcagcaccctgcccctctgcaacagctgctgatagacaacctgcaaggtccaggctctgggagagaaattggtcctcgtccagcttctactgcctttggtctgtggtatcacccttgctctgagcactcttgtgtcagaaaaaaaaaagtttttgagacctctgttttagttttagaaatccaagatttccatttcctgctgtatgtatttttatgttgtacctaacaataaagaaaga

SEQ ID NO: 7076 - DNA, 579 bp, Cricetulus griseus
  misc_feature (77)..(103): n is a, c, g, or t
  misc_feature (223)..(240): n is a, c, g, or t
  misc_feature (328)..(361): n is a, c, g, or t
ggcaagaaattcaagggccctgagtttgtgcgcaagcacatcttcaataagcacgcggagaagatcgaggaggtgannnnnnnnnnnnnnnnnnnnnnnnnnntcctcacggatgccaagcgcccagcattgcccgagatgaagccagctcagccacctggccctgcccagatactccccccaggcctgaccccaggacttccctacccacaccagacgccannnnnnnnnnnnnnnnnnggccagcccgcccttcccatctttgggctatggagctggtgctgtccgccctgcaggtcccaacaggagggcctccatatccccatgnnnnnnnnnnnnnnnnnnnnnnnnnnnnnnnnnnttttcgaggccaaggaggatatcctgggaaacctcggaacaggatggttcgaggagacccgcgggccatagtggagtatcgggacctggacgccccagatgatgttgatttcttttgagacatctgccgccctcactctacatctgctgccctctatccccgggaccacttaccccatgagctgacaggttttttgtacgttatttttcctgctagtt

SEQ ID NO: 7077 - DNA, 600 bp, Cricetulus griseus
  misc_feature (560)..(574): n is a, c, g, or t
ttgtaaataaagccaagagcatatcttaatgcctgtggtgtacctgggtgagaacagagggtagaaggagtctcgagctccctgtgacttgcgtgtggtagaaatatctgtcatgtgtttaacgggatgactttggagcatgtggagtcatagctgtgtgttgctagagggacacaggcctttctttcccctttcatcccagatggaccgtgaccatttgggactttctccttttgtagtcaccacgtgtgtgtctggtaaataggtattctgttttggtctcacagcaccattacaagtctgtcactctgaaataacctaatgccaattaacagtgcatgctttgggagttgggaaggcagcttcctctggggagtgtatttgctgacattgagttttccatcagtcctcaatgagaaatggatggcgtgtttgccaaaccctgttcacagcactcaggggagggtgccagcaaggtggagaccggcctcacattgctgttctgattcctacttcagtgctttggaagccggagaggccaacctcaagggtattttttnnnnnnnnnnnnnnnataaatcagcacagcctgctctctgg

SEQ ID NO: 7078 - DNA, 1371 bp, Cricetulus griseus
  misc_feature (399)..(414): n is a, c, g, or t
  misc_feature (546)..(563): n is a, c, g, or t
ggttgcaaggcatggtgacagaaacatcgatgaaatggcagaaggaatgtgaacggtcggtggcagccacccagctggagatgcagaataaactgtgggtcaaagatgaaaagctcaaacagttgagggccattgtgactgaaccaaaacctgagaagccagagagaccctcccgagaaagggaccaggaaaaaatcattcagagatcggtctctccttcgcctgtgcctctttctagtaacaatattgctcagatttccaacggccagcaactcatgagccaaccacagctacacaggcgctctaactcttgcagcagcatttctgtagcttcctgtatttcggaatgggagcagaaactatctccgttcagcacacctgtcaatgtcacctctcttnnnnnnnnnnnnnnnnaggagccaggacaaagtaaaacatgtatcgtgtcagacagaaggcgagggatgtactggactgaaggcagggagatggtccctacattcagcagtgagataggcgtagaagaggaccattgccacaggaacnnnnnnnnnnnnnnnnnncacagaaggtcccgctctgcagggagcagatgggtagatcataagcctgcctctaatgtgcaaactgagacagtcatgcagccacatgtccctcatgccatcacagtatctgttgcaaatgaaaaggcgctagctaagtgtgagaagtacatgctgacccaccaggaactagcctccgatggggagattcagactaaagtaattaagggtgatgtttataagaccagaggtggtggacaatctgttcagtttactgatattgagactttaaaacaagaatcgccgactggtagtcgaaaacgaagatcatccacagtagcacctgcccaaccagatggtacagagtctgaatggaccgatgtagaaacaaggtgttcagttgctgttgagatgagagcaggatctcaactgggacccggatatgagcatcatgcacaacctaagcgaaagaagccttgacctgatagccctggtggccgaagaatgtttttgtttgtgttggtgatttctccaaagctgtgccagacgcagtatctgaatcatcctacagaagaatgtatctggatcacattgtattttttattgtgacttttccaactgttctgaatattttctaaggttttataaaaaaaaaaaatgctgctattgattagccgcaaaaaatgcactttagacatatttaagaatttaaagatggtgagtgggcaatggtaaaaccattttaggaagatgtttagaattctgtatgtatatattcactttctgcttttatatatgccaaaagaattgaaataaaaagcactaaaaa

SEQ ID NO: 7079 - DNA, 1373 bp, Cricetulus griseus
aacgaatcggaggtggtgtgtctgcggcagaagaccgcagcccaggtgaccttactggctgagcaaggtgaccggctccacgggctagagatggagcgccgccgactccacaaccagttgcaggaacttaagggcaatatccgggtattctgccgggtgcgccctgttcttgcaggggaacctactccatcgcctggctttctcctgtttccccatggccctgctggaccctctgaccccccaacccgccttagcctttcacggtctgatgatcggcgttcgaccctgaccagggcgcctgcacccactacgcgccacgatttctcctttgaccgggtgttcccaccaggaagcaaacaggaggaagtgtttgaggagatttccatgctggtccagtcggcactggacggctaccctgtgtgcatctttgcctacggacagaccggcagtggcaagaccttcactatggagggcaggcctgggggagacccccagttggaggggctgatccctcggcgcatgcggcatctcttctctgtggctcaggagatgagtggccagggctggacctacagttttgtggcaagttacgtagagatctacaatgagaccgtccgagacctgctggccactgggacccggaaggggcaaggcgagtgtgagattcgtcgagcaagaccaggcagtgaggagcttactgtcaccaatgcacgctatgttcctgtttcctgtgagagagaggtggaggctctgctccatttggcccaccagaatcgagctgtggcccgcactgcccagaatgagagatcatctcgaagtcacagtgtgttccagctgcagatttctggagagcatgctgctcggggcctgcagtgtgtcgctccccttaaccttgtggacctggctgggagtgagcggctagaccctggtttaaccttaggccctggggaacgtgatcgccttcgggaaacacagtccattaatagcagtctgtctaccctgggactggtcataatggccctgagcaataaggagtcccacgtgccttaccgaaacagcaagcttacctacctgctgcagaactcgctgggtggcagtgccaagatgctcatgtttgtgaacatttcccctctggaagagaatgtctctgagtctctcaattcactacgttttgcttccaaggtgaaccagtgtgttatcggtactgctcaggctaataagaagtgaagatggccagagcctggttccgctgccgctgggttgattgtgtctctctctgtgtgtactgggggggagaggggggtgagagatacgcttttattgggtggacatcatttgtacccaactatcaaataaagaaattttgttgtaga

SEQ ID NO: 7080 - DNA, 1400 bp, Cricetulus griseus
  misc_feature (209)..(225): n is a, c, g, or t
  misc_feature (227)..(244): n is a, c, g, or t
aggctgtgtaagatttgtttttaaactgtacagtgtcttttttttgtgtgttaacacactaccgatgtgtcttggatggtcctgtcctggtggtattttcaatgaccactaacctgcctggtacagtctgggggttgtaaattggcatggaaatttaaaggcaggttcttgtttacacagcacaaattagttatatatggggacggtannnnnnnnnnnnnnnnncnnnnnnnnnnnnnnnnnnggttttttttttccatcttcagttgtctttgatgcagcttatacgaaaataattgttctgttaactgaataccactctgtaattgcaaaaaaaaaattgcagctgttttgttgacattctgaatgcttctaagtaaatacaatttttttttattagtattgttgtccttttcataggtctgaaatttttcttctcaaggggaagctagtcctttgcttttgcccattttgggtcacatgaattattgcagtgtttcttttcgtatagttagctggagaaaagcttttatctacacaccctgcatattgtgatgggtaacattttcatccatagttgaaagcccaaaattgtgattagttggataagagatagtacataaaccatgtgcaaaactgagagtgatcaattctatcacaccatggaataagaatcgaacaatctgaaagtctgccttgaaggactagtagaaaattgtgttctaatccttacgtgaggactcttcttaacgtcattactgtgtaatggcagttacattctgcagttccctattaaagacctgagaatgtatccctcaaaagcgtgagctaaaatacaagactgccatattaaactttgtgacattggtcctagcgaaggctatgataagaacgctggctgtaatgcctttgcccatctatctaaatacaggattgctcaggaaacttgactgtttaaaaaaaaagtatttttaattagttgagccagcttttcttaaaattatgccacatataaaattaagggtatattttcctacattgtgatttgtcccttataaatcagatacaaggaaagatgataaactttgcatattagtaccagttgtccaatccatttggtttttctttataaaacccaaactcattagtcatgtttaatctgcttagcagttagggaacaatttggcaattttgtgttttttttttgagattatcattctcttaaagtgccagtgtttttaaaatagcgttctgtaattttacacgctttgtgatggagtgctgtttgttatataattttgacatgggttctttacattgcgtttgtttatgtaatttgaggaggaatactgaacatgagtcctggatgatactaataaactaataattgcagaggtttt

SEQ ID NO: 7081 - DNA, 900 bp, Cricetulus griseus; identical to SEQ ID NO: 3439
  misc_feature (127)..(155): n is a, c, g, or t

SEQ ID NO: 7082 - DNA, 600 bp, Cricetulus griseus
  misc_feature (408)..(408): n is a, c, g, or t
  misc_feature (492)..(506): n is a, c, g, or t
acttcttcgacagaggctactgtgaagttactactccaacactggtgcagacgcaggtggaaggtggggccacactcttcaagcttgactattttggagaagaagcgtttttaacccagtcctcgcagctgtacctggagacctgccttccggccctgggggatgttttctgtattgcccaktcatacagggctgaacagtccagaacacgaaggcacctggctgaattcactcatgtggaagctgagtgtcccttcctgacctttgaggacctcctgaaccgtttagaggacctagtgtgtgatgtggtggacagagtcttgaagtcaccagtggcaagcatagtgtatgacctcaacccgaactttaaaccccctaaacggcctttcaggcggatgaactattcanaagctatcgagtggctgagggagcacgatgtaaagaaagaagacgggacactctatgaatttggagatgatattcccgaagctnnnnnnnnnnnnnnnacagacaccattaatgaaccaatcctgctgtgtcgggttcctgtggagatcaagtccttctatatgcagcgatgtgcctgagatcctcgactta

SEQ ID NO: 7083 - DNA, 580 bp, Cricetulus griseus; identical to SEQ ID NO: 3441
  misc_feature (247)..(262): n is a, c, g, or t
  misc_feature (426)..(518): n is a, c, g, or t

SEQ ID NO: 7084 - DNA, 554 bp, Cricetulus griseus; identical to SEQ ID NO: 3442
  misc_feature (508)..(508): n is a, c, g, or t

SEQ ID NO: 7085 - DNA, 600 bp, Cricetulus griseus
cctggctgacggctggcaggaagcakggcgtcgggatgagtgcaggctcggaccccgtggttatcgtctctgcggcgcggaccgccatargctccttywwtggtgccctgtctactgtgcctgkcsacgacctcgggacaactgtcatcaaagaagtcctgcakagggccaaggtggccccasaagadgtgtccgakgtcatattwggacacgttttgacggcaggttgtgggcagaatcctactcgacaggccagtgtgggtgcakggatcccctactcagttccagcatggakctgccakatgatctgyggctcawgcctcaaggccgtgtgtcttgcagcccagtccatagccataggtgactccakcattgtggtggcaggaggcatggagaacatgagcaaggcccctcactyggctcacctgakagcakgagtcaagatgggtgakatgccgctagctgacagcatactgtgtgatggtcttacagatgcgtttcacaactatcatatgggcatcacagctgagaatgtggccaaaaaatggcaagtgagtagagaagcccaggacaaggttgccgttgtgtcacaaatcaggg

SEQ ID NO: 7086 - DNA, 600 bp, Cricetulus griseus
  misc_feature (386)..(415): n is a, c, g, or t
gatgtgtttgcctgctttgccacccctgcagtctcgtggcgcctcctgtctgtggagcatgaagactttttaacagttgcagattcactgaagaaagaatttgatagtccagaaactgctgatctgaggtttcgaattgatgggaaatatattcatgtccataaagctgttttgaaaatcaggtgtgagcacttccgatccatgttccagtcctactggaatgaggacatgaaggaggtgatagagatagaccagttttcttaccccgtgtaccgtgcctttctccagtacctctacacagacacagtggatctgccacccgaggatgccataggtctcttggacttggcgacatcgtactgtgaaaacagactgaagaggctttnnnnnnnnnnnnnnnnnnnnnnnnnnnnnntggaaaacgctttctcattattctctgctgcagtcagatatgatgcagaggatttagaagaattctgctttaagttttgcatcaatcatttgacagaagttacacagactacggcattttggcaaatggatggccccctgctaaaggagttcattgctaaagccagtaaatgtggagcctttaag

SEQ ID NO: 7087 - DNA, 600 bp, Cricetulus griseus
gaaagagcacatggatgccataaatcatgacaccaaagagctggagaagatgaccaaccgacagggcatgctgctgaagaagaaggaagagtgcatgaagaaaatccgggagttggggtcccttcctcaggaagcctttgaaaagtaccagacactgagcctgaagcagttgtttcgaaaacttgagcagtgcaacacagaattgaagaagtacagtcacgttaacaaaaaagctttagatcagtttgtgaatttctctgagcagaaagaaaagttgataaagcgacaagaggaactggataggggctacaaatcaatcatggaattaatgaacgtgcttgaacttcgaaaatatgaagctattcagttaactttcaaacaggtatctaagaacttcagtgaagtattccagaagttagtacctggtggcaaaacaactttggtgatgaagaaaggagatgtggagggcagccagtctcaagatgaaggagaagggagtggcgaaagtgagaggggctctgggtcacagagcagtgtcccatcagttgaccagttcacaggagttggaatcagggtgtcatctacaggaaagcaaggtga

SEQ ID NO: 7088 - DNA, 600 bp, Cricetulus griseus
aacagcataatagagcacatgcctcctgagtcagttgaccaatacaggaagcagatcttcattctactgttccaaagactgcagaactccaagaccaccaagtttatcaagagtttcttagtgtttattaatttatattgcattaagtatggggcattagcattacaagaaatatttgatggcatacaaccaaagatgtttggaatggttttggaaaaaatcattattccagagattcaaaaggtatctggaaatgtggagaaaaaaatttgtgcagttggcataaccaaattactcaccgaatgtccaccaatgatggacacagagtacaccaagctatggactcctttgttacaatctctcatcggcctttttgagttgccggaggacgacaccattcctgatgaagagcattttattgacatagaagatacaccagggtaccagactgccttctcacagctagcatttgctggcaaaaaggaacatgatcctgtagggcagatggtgaataacccgaaaatccatctggcacagtcacttcacaaactgtctactgcctgtccggggagggttccctcaatggtgagcaccagcctc

SEQ ID NO: 7089 - DNA, 561 bp, Cricetulus griseus; identical to SEQ ID NO: 3447
  misc_feature (282)..(299): n is a, c, g, or t
  misc_feature (423)..(469): n is a, c, g, or t

SEQ ID NO: 7090 - DNA, 526 bp, Cricetulus griseus; identical to SEQ ID NO: 3448

SEQ ID NO: 7091 - DNA, 596 bp, Cricetulus griseus; identical to SEQ ID NO: 3449
  misc_feature (263)..(278): n is a, c, g, or t

SEQ ID NO: 7092 - DNA, 565 bp, Cricetulus griseus
  misc_feature (61)..(61): n is a, c, g, or t
  misc_feature (147)..(161): n is a, c, g, or t
  misc_feature (457)..(457): n is a, c, g, or t
  misc_feature (465)..(465): n is a, c, g, or t
  misc_feature (500)..(500): n is a, c, g, or t
gcggcggtagcgggtggcttgtggtgcagctttaccacagaaggaaccgcgcaggccttantgtgagtggtcactgtagatcccgggaacctggtggccttagtccttcaggtggatcagcgtgcgacatgggaaagaaaaccaagnnnnnnnnnnnnnnntcttcttccgaggatgaggaggagtatgtggtggaaaaggtgttagacagacgcatggttaaggggcaagtggagtatctgttgaagtggaaaggcttttctgaggagcacaatacttgggaacctgagaagaacttggattgtcctgaactaatttctgagtttatgaaaaagtataagaagatgaaggagggtgaaaacaacaagcccagggagaagtcagaaggaaacaagaggaaatccagtttctctaatagtgctgatgatataaaatctaaaaaaaagagagagcagancaatgatntcgctcgaggctttgagagaggactggaaccaganaagatcatttggggcaacagattcctgtggtgacttaatgtttcttaatgaaatggaaagacaca

SEQ ID NO: 7093 - DNA, 755 bp, Cricetulus sp.; identical to SEQ ID NO: 3451

SEQ ID NO: 7094 - DNA, 1400 bp, Mesocricetus auratus
gcctcctgccccagatcctggagaatctgctgagtgcccggaagagggccaaggctgagctggctcaggagacagaccccttgcggcggcaggtcttggatggacggcagctagcactgaaagtgagtgccaactctgtgtatggcttcactggtgccgaggtgggcaagctgccatgtttggagatctctcagagtgtcactgggttcgggcggcagatgattgagaaaaccaagcaactagtggagtccaagtacaccctggaaaatggctacaatgccaatgccaaggtggtctatggtgacactgactctgtgatgtgccgatttggtgtctcctctgtggctgaggcaatgtctctgggtcgagaggctgcaaaytgggtatctagtcacttcccatcacccatccgactggagtttgagaaggtttacttcccatacctgctcatcagcaagaagcgctatgctggcctgctcttctcctcccagcctgatacccatgacagaatggactgcaagggcctggaggctgtgcgcagggacaactgtcccctggtggccaaccttgttacatcctctctgcgacgaatccttgtggaccgggatcccgatggggcagtggcccatgcaaaggatgtgatctcagacctgctgtgtaaccgcatagacatctcccagctggtcatcaccaaggagctgacccgagcagccgcagactatgctggcaagcaggctcatgtggaactggctgagaggatgaggaagcgtgaccccggcagtgcgcccagcttgggtgaccgcgtcccctatgtgatcatcggtgctgccaaaggcgtggctgcctacatgaagtcggaggaccccctgtttgtgctggaacacagcctgcccatcgacactcaatactacctggggcagcagctggccaagccactgctgcgaatttttgagcccattctgggtgagggccgtgcagagtctgtgctgctccgaggagaccacacacgctgcaaaaccgtgctcaccagcaaggttggtggcctcctagccttcaccaagcgccgcaactgttgcattggctgccgctcagtgatcaaccatcagggagctgtgtgtgaattctgtcagccccgggagtcrgagctctatcagaaggaggtgtcacacctgaatgccttggaggaacgcttctcgcgcctctggacacagtgccagcgttgccagggcagcttgcatgaggacgtcatctgcaccagccgcgactgtcccatcttctacatgcgcaaaaaagtgcgcaaggacctggaggaccaggagcggctgctgcagcgttttggacctccgggcccmgaggcctggtgactcgacgagggacacggaataaagttcagacttttt

SEQ ID NO: 7095 - DNA, 1400 bp, Cricetinae gen. sp.
  misc_feature (845)..(863): n is a, c, g, or t
aaattttatatacgccagaaaaatgagtaaaagagactgcttagctgsttcaaaacagcagtaatagattaaatggtcaaggctggggatacgctcagtggtaccatgattgccttgtaggcatgaggtcatgggttgttgattccctagtccttaaaataattatagcwrtrayrgwtaacaggtaggtccaagggagagtacgtggtatctaatcatcccttatgcttcargacccacttcataaccagaactctggatgctcaagtcttgtacaagattgtrtttgacctatgcacatctttcatgctggattgcttgtagcactgaacacagwgtaaatgctaacataaatgattattatactgtgctttgtggtaagtaaaagtkcatattcagtacagatcaaatattaatatgcagktggtttgaacctttgggtgccttggcccacagatktgaaagggcagktctatatgctaatttttgtcatttttcgttgattttgtgctttaaccattctaagatgttttactacttaactgttacttttagtggtaatggtaactggttaactcttttaaatagttatttaccacttagcaaaatctgttcataattatagtggaagagatgttagtcataaggtgagagtgagttgggaagttacaagagttgggaaaacttttagcactaccagtcctgggcctggataatcttgtagggtctgacctgggttggatgtttaagtagaatctctgcaccctgtacactcagtatcatttagcgcccctttgctaagacaaccaccaccaaaaaatggggggtgggttgggttttgaggnnnnnnnnnnnnnnnnnnncctggctcttcttgaactcactctgtagactagtctagccctggaactcaggatctacctgcttctgtcttccaagtgctaggattaaaggaacggactaccatacccagcaataaccagaattttaatgcatgataccaagtgtccaataggggcagagatacctctagttgagaaccactcactgttctgtagtcagggcttactttagaggtggaaacacaagggaatagcagtgagaaagtttaggatgagtgtgatgaataggcatatattataaggagattttgatgttatagattaggcatatattgagattgtgtcttgattgatgaactttttaaaacttgctacaggtgtgtcaaatttgagatcttaagacagctttagacttaaatgctgtgtaatgaataattttttcttataaaaattttgtaaattttgttaatttcttgataactcaaaagtttatttatttatcttcgaagatacaactatgtagcaagtatttattgaaaattaaaaataaactatttt

SEQ ID NO: 7096 - DNA, 600 bp, Cricetulus griseus
  misc_feature (31)..(48): n is a, c, g, or t
  misc_feature (484)..(484): n is a, c, g, or t
tacgaactcaagcatgcgtcacatatcagcnnnnnnnnnnnnnnnnnncacagtgtcaaaggcttgggcaaaacgacccctgacccttcggccagcatcaccctggagggtgtasaggttccactggggacagggatcccatcgggtgttaatgacacctgcctactatataacgagtacatcgtctatgacattgctcargtgaacctgaaatacctgctgaaactgaagtttaattttaagacatccctgtggtgaagtgygaggggtgtgctgcacccakcacccaagcctakgggtaaacttccccctggtgcctccacaccacagacaccacaaaacctcagccacaccgctgcctaatggtggcaccctcacccgatctccttagggttctatatagacaggttaaagggctctgggttcaagtcccttgtccgtgttgcactcggtgggagggttgttaggggttttatcctaccangcatagccctgatagacacggctgacagtagarggaaagttggggagargtttttgttttgtttgcctagactagtcttgagggggaaaagccacgtcacagccacaatgtctgcc

SEQ ID NO: 7097 - DNA, 600 bp, Cricetulus griseus
ataatgccgatactttagcactcgtatttgaagcaccaaatcaagagaaagtttcagactatgaaatgaagttaatggacttggatgttgagcaacttggaatccctgaacaggagtacagctgtgtggtaaagatgccttctggtgaatttgcgcgcatatgccgagaccttagccatattggagatgctgttgtaatatcctgtgcaaaggatggggtgaagttttctgcaagtggagagcttggaaatggaaacattaagttgtcacaaacaagtaatgttgataaagaggaggaagctgtaaccatagaaatgaatgagccagttcagctaacttttgcactaaggtacctgaactttttcacaaaagctactccactgtctcctacagtaacactcagtatgtctacagatgtaccccttgttgtagagtataaaatttctgacatgggacacttaaagtattatttggctcccaagattgaagatgaagaaggatcttaggcgttgctagaatctgagaaaaccaagcctttgagaactgcttctgagatgccagcatgttttgaagtcttttctgtcaccaagtttgtacctg

SEQ ID NO: 7098 - DNA, 451 bp, Cricetulus sp.
  misc_feature (30)..(63): n is a, c, g, or t
ggctcaacaaatctgctaggkctamtaccnnnnnnnnnnnnnnnnnnnnnnnnnnnnnnnnnnaacctargaatagctatcccacyatgagctggagctgtaatcttadggtttcgacataaaataaaagactcacttgctcactktctyccacaargaacccctattscacttatcccaatactagtaattattgaaacaawtagctkatttattcaacctatagccttagctgtacgtttaacagctaatatcaccgcaggacatctgctaatgcacttaattggaggagctacactagtcctaacctcaatcagcctaccaactgctataatcacmwttattatcttaattatattaactatcctagagttcgctgtagccttaattcaagcctatgtatttacactactagtaagcctatatctacatgataatacgtaatgaccca

SEQ ID NO: 7099 - DNA, 600 bp, Cricetulus griseus
  misc_feature (199)..(214): n is a, c, g, or t
gctgtaacatgccagcttcccattgatcgtggtggaggtgaaggaaaggccatgtacattgacaccgagggtacgtttaggccagaacggctgctagcagtggctgagaggtatggtctgtctggcagcgatgtcctagataatgtagcatatgctcgagggttcaacacagaccaccaaacccagctcctttatcaannnnnnnnnnnnnnnntagaatccagatatgcactgcttattgtagacagtgctactgccctctacagaacagactactcaggtcgaggagagctttcagccaggcaaatgcatttgkmcwsakktctgaggawgctkctsmgmcwkgcwratgmrtttggwgtwkcwgwggwwrtcaccaaccaggtagtagcccaagtggatggagcagccatgttcactgcagatcccaaaaaacccattggaggaaacatcattgcccatgcatcaacaaccaggctgtacctgaggaaaggaagaggggagaccagaatctgcaaagtctatgactctccctgtctccctgaagctgaagccatgtttgccattaatgcagatggagtaggagatgccaaggactga

SEQ ID NO: 7100 - DNA, 1400 bp, Cricetulus griseus
ccacgagcgctcctccgarrgcgatrgtttggctcctcctcagcatcttatccgagtggaaggaaatwtgcatgccgartacctggatgacaagcaramwtttcggcacagtgtggtggtrccmtatgagccacctgaggttggctctgactgtaccaccatccaytayaactacatgtgyaatagttcctgcatggggggcatgaaccggcggccyatcctyaccatcatcacrctggargaccccagtggkaacctgctgggacggaacagctttgaggttcgtatttgtgcctgycctgggagagaccgtcgtacmgaggrmraaaatttccaraaraarggagaaccttgcccagarctrcccccaaagagtgctaaacgagcattgcctaccaacacaagctcctctccccmgccaaagaraaaaacacttgayggagaatatttcacccttaagatccgwggtsawgarcgcttcaagatgttycaagarytgaatgaggccttggaaytgaaggatgcwcaggcttyraaggsgtcagaggacartggtgctcactccagctacctgaagtccaagaagggccagtctgcctcccgtcttaaaaaactaatgatcaagagagaggggcctgactcggactgacytccttcctmkgcctcctgtsccccaycagcaacytcccawcccccwcctccttycctgmcattttgtcacttgggtgcttgaaccccrgcytgggtrgatctgtcatctctgwtatctggggagggtggtgggatacaccarkacaccakctyagcttttargattctgrccatgaggaaaggaagaaaattctcaataggtggkgtkrgaatttacaaytggccatgtgcarkgtgaggccccacccaaytctctaagaaagccatctgagtttactttctcctgacttgaaagccacatctrtaaaatgcagatgrgcatacctgcttctcagggtttsttgtgatacttgtgatacttgtcccttccrcaccwtttattaccttgtggcctggactcwgycccctctgtgagtsctggttcctggcccctrttgggkgrtrggttrsyagstsycwgststctgctggcccagcgaaatcctatccagccacttgwtggaccctggcacctaaaatgaaatttcaccccrccckaywcsctgtaagattctatcttgggctctcatrgggtccatawccaccaagacccattttctttccaccctgcactcrggatcagtttctttgaactctgcccagcctttctarcctttctgcatttaccrtccccccctctctttttataccatryccccttttatataccrattwcttattttacaataaaattttgttatcacytgtwa

SEQ ID NO: 7101 - DNA, 302 bp, Cricetulus griseus; identical to SEQ ID NO: 3459

SEQ ID NO: 7102 - DNA, 578 bp, Cricetulus griseus; identical to SEQ ID NO: 3460
  misc_feature (414)..(456): n is a, c, g, or t

SEQ ID NO: 7103 - DNA, 174 bp, Cricetulus griseus; identical to SEQ ID NO: 3461
  misc_feature (134)..(134): n is a, c, g, or t

SEQ ID NO: 7104 - DNA, 579 bp, Cricetulus griseus; identical to SEQ ID NO: 3462

SEQ ID NO: 7105 - DNA, 579 bp, Cricetulus griseus; identical to SEQ ID NO: 3463

SEQ ID NO: 7106 - DNA, 579 bp, Cricetulus griseus; identical to SEQ ID NO: 3464

SEQ ID NO: 7107 - DNA, 503 bp, Cricetulus griseus; identical to SEQ ID NO: 3465

SEQ ID NO: 7108 - DNA, 493 bp, Cricetulus griseus; identical to SEQ ID NO: 3466

SEQ ID NO: 7109 - DNA, 581 bp, Cricetulus griseus; identical to SEQ ID NO: 3467
  misc_feature (120)..(142): n is a, c, g, or t

SEQ ID NO: 7110 - DNA, 221 bp, Cricetulus griseus
ccagcgaccagtatgaagcactggcaaggtaacagcggtccttgcagaaacccgatgtcctgaccaccggtaggcgggtaacccaatagggagcataaacttaatatcatgactgctgggtcccgaggtaccccttctggttcaggatgtggttttcactgatgagatggcacattttgacagagtagcgaattcccgagagagtggtacatgcaaaagga

SEQ ID NO: 7111 - DNA, 579 bp, Cricetulus griseus; identical to SEQ ID NO: 3469

SEQ ID NO: 7112 - DNA, 497 bp, Cricetulus griseus; identical to SEQ ID NO: 3470
  misc_feature (39)..(51): n is a, c, g, or t
  misc_feature (53)..(77): n is a, c, g, or t

SEQ ID NO: 7113 - DNA, 466 bp, Cricetulus griseus
  misc_feature (325)..(325): n is a, c, g, or t
ttatacgctcaaattaacaacacatcccttgcggagttggaaaagcggttaaaagagacaccgtttgaccctcctaaagttgaaagtgcagaaagctttccaagctatgacacagcttctgagcagctgcatgaggcagggtatgatgcttacatcacaggactctgcttcatctccatggcaaattacctaagttctttactcggacctccaaaagtgtgtgtgtctgccagatcaaaactcattgaacccttttttaacaagttatttcttatgagggtcatggacattccatatttaaacttggaagggccagagcttacancctaaacgtgatcatgttctccacgtgacattccccaaagaatggaaaaccagggacctttaccagctcttcagcgcctttggtaacatccaaatatcctggattgatgacacatcaccctttgtttctctcagccagcca

SEQ ID NO: 7114 - DNA, 580 bp, Cricetulus griseus; identical to SEQ ID NO: 3472

SEQ ID NO: 7115 - DNA, 577 bp, Cricetulus griseus; identical to SEQ ID NO: 3473

SEQ ID NO: 7116 - DNA, 579 bp, Cricetulus griseus; identical to SEQ ID NO: 3474
  misc_feature (408)..(444): n is a, c, g, or t
  misc_feature (482)..(515): n is a, c, g, or t

SEQ ID NO: 7117 - DNA, 224 bp, Cricetulus griseus; identical to SEQ ID NO: 3475

SEQ ID NO: 7118 - DNA, 581 bp, Cricetulus griseus; identical to SEQ ID NO: 3476
  misc_feature (309)..(309): n is a, c, g, or t
  misc_feature (448)..(448): n is a, c, g, or t
  misc_feature (508)..(508): n is a, c, g, or t
  misc_feature (524)..(524): n is a, c, g, or t

SEQ ID NO: 7119 - DNA, 334 bp, Cricetulus griseus; identical to SEQ ID NO: 3477

SEQ ID NO: 7120 - DNA, 600 bp, Cricetulus griseus; identical to SEQ ID NO: 3478
  misc_feature (27)..(65): n is a, c, g, or t
  misc_feature (403)..(419): n is a, c, g, or t

SEQ ID NO: 7121 - DNA, 494 bp, Cricetulus griseus; identical to SEQ ID NO: 3479
  misc_feature (373)..(393): n is a, c, g, or t

SEQ ID NO: 7122 - DNA, 540 bp, Cricetulus griseus
tattgaaactgctagctttattgacgtggatgatgaaagatggcactactttctagtatttgagaagtataataaggatggagctacgctctttgcgaccgtagggtgcgtgacagtctataattactatgtgtacccagacaaaacccggccacgtgtaagtcagatgctgatactgactccatttcaaggtcagggccatggtgctcaacttcttgaaacagttcatagatactacattgcatctccttcagttcttgatataacagctgaagatccatccaaaagctatgtaaaactaagagactttgtgcttgtgaagctttgtcaagatttgccctgtttctcccgggaaagattaatgcaaggattcaatgaagatatggcaatacaagcacaacagaagttcaaaataaataagcaacatgctagacgtgtttatgaaattcttcgactgctggtaactgacatgagtgatgctgaacaatacagaagctacagactggacattaaaagaagactaattagcccttataagaa

SEQ ID NO: 7123 - DNA, 578 bp, Cricetulus griseus; identical to SEQ ID NO: 3481
  misc_feature (546)..(546): n is a, c, g, or t

SEQ ID NO: 7124 - DNA, 327 bp, Cricetulus griseus; identical to SEQ ID NO: 3482
  misc_feature (97)..(138): n is a, c, g, or t

SEQ ID NO: 7125 - DNA, 581 bp, Cricetulus griseus; identical to SEQ ID NO: 3483

SEQ ID NO: 7126 - DNA, 576 bp, Cricetulus griseus
  misc_feature (377)..(377): n is a, c, g, or t
tgattatgaagttattcctaacagtaacttctatgtatctagaacagcctacagagataacacttctgtctattatataagtgggaagaagaggacatttaaagatgttggaaatcttcttagaagccatggaattgacttggaccataatcgatttttaatattgcagggtgaagtcgaacagattgctatgatgaaaccaaaaggccagactgaacatgatgagggtatgcttgagtatttagaagatataattggctgtggacggctaaatgaacctattaaagtcttatgtcggagagttgaactattaaatgaaaacagaggagaaaagttaaacagagttaaaatggtggaaaaggaaaaggatgccctanaaggagagaaaaacatagccattgagttccttaccctggaaaatgaaatatttaaaaaaaagaatcatgtctgtcaatattacatttatgatctacaaaaaagaattgctgaaatgaaaactcaaaaggaaaaaattcatgaagatactaaagaaatcactgagaagagcaatatgctttcaaatgaaatgaaagctaa

SEQ ID NO: 7127 - DNA, 575 bp, Cricetulus griseus
  misc_feature (537)..(537): n is a, c, g, or t
gaaatgtgtccctaaagtgcctcactgagattgctggtgtgagtgtaagccaatacgaggaacaatttgaaactctgtttacacttacaatgatgcagctaaagcagatgcttcctttaaatactaatattcgagttgcatactcaaatggaaaagatgatgaacagaactttattcaaaatctcagtctatttctctgcacctttctaaaggaacatggtcaacttttagaaaaaagactgaatctcaaggaagcactcatggaggctcttcattatatgttgttggtgtctgaggtcgaagaaactgaaatttttaaaatctgtcttgagtactggaatcatttggcagccgagctctatagagagagtccattttctacatctgcttctccattgttatctggaagtcagcattttgatattcctccaaggagacagctgtacctaactgtgttatcaaaggtccgtttattgatggttagtcgcatggctaaaccagaggaggtactggttgtagaaaatgatcagggagaangtgtaagagagttcatgaaggataccgattccataaat

SEQ ID NO: 7128 - DNA, 555 bp, Cricetulus griseus; identical to SEQ ID NO: 3486

SEQ ID NO: 7129 - DNA, 533 bp, Cricetulus griseus; identical to SEQ ID NO: 3487
  misc_feature (454)..(479): n is a, c, g, or t

SEQ ID NO: 7130 - DNA, 579 bp, Cricetulus griseus; identical to SEQ ID NO: 3488

SEQ ID NO: 7131 - DNA, 507 bp, Cricetulus griseus; identical to SEQ ID NO: 3489

SEQ ID NO: 7132 - DNA, 478 bp, Cricetulus griseus; identical to SEQ ID NO: 3490
  misc_feature (320)..(334): n is a, c, g, or t

SEQ ID NO: 7133 - DNA, 484 bp, Cricetulus griseus; identical to SEQ ID NO: 3491

SEQ ID NO: 7134 - DNA, 523 bp, Cricetulus griseus; identical to SEQ ID NO: 3492

SEQ ID NO: 7135 - DNA, 528 bp, Cricetulus griseus; identical to SEQ ID NO: 3493

SEQ ID NO: 7136 - DNA, 561 bp, Cricetulus griseus; identical to SEQ ID NO: 3494

SEQ ID NO: 7137 - DNA, 350 bp, Cricetulus griseus; identical to SEQ ID NO: 3495

SEQ ID NO: 7138 - DNA, 578 bp, Cricetulus griseus; identical to SEQ ID NO: 3496

SEQ ID NO: 7139 - DNA, 561 bp, Cricetulus griseus; identical to SEQ ID NO: 3497
  misc_feature (506)..(506): n is a, c, g, or t

SEQ ID NO: 7140 - DNA, 402 bp, Cricetulus griseus; identical to SEQ ID NO: 3498

SEQ ID NO: 7141 - DNA, 579 bp, Cricetulus griseus; identical to SEQ ID NO: 3499
  misc_feature (143)..(211): n is a, c, g, or t

SEQ ID NO: 7142 - DNA, 382 bp, Cricetulus griseus; identical to SEQ ID NO: 3500

SEQ ID NO: 7143 - DNA, 537 bp, Cricetulus griseus; identical to SEQ ID NO: 3501

SEQ ID NO: 7144 - DNA, 502 bp, Cricetulus griseus; identical to SEQ ID NO: 3502

SEQ ID NO: 7145 - DNA, 168 bp, Cricetulus griseus; identical to SEQ ID NO: 3503
  misc_feature (93)..(108): n is a, c, g, or t

SEQ ID NO: 7146 - DNA, 519 bp, Cricetulus griseus; identical to SEQ ID NO: 3504

SEQ ID NO: 7147 - DNA, 524 bp, Cricetulus griseus; identical to SEQ ID NO: 3505

SEQ ID NO: 7148 - DNA, 579 bp, Cricetulus griseus; identical to SEQ ID NO: 3506

SEQ ID NO: 7149 - DNA, 467 bp, Cricetulus griseus
atcagatatcagctttgacaagactgatgaatcactggagccaagaactgagacagacaattcaggcacacctcacaataatggaggcatgcgcctacatgactttgtctcaaagacggttataaagcctgaatcttgtgttccctgtggaaagcgcatcaaatttggcaagctgtctctcaaatgtcgagactgccgtttggtctctcatccagaatgtcgggatcgatgtccccttccctgcatttctcccctggtgggaactccagttaagattggagagggaatgttggcagattttgtgtcccagacttctccaatgattcctgctattgttgtcagctgtgtgaatgagatagagcagcgaggcctgactgaggcaggcttatacaggatctcaggctgtgaccgaacagtaaaagagctgaaagagagattcctcaaagtgaaaactgtacccctcctca

SEQ ID NO: 7150 - DNA, 509 bp, Cricetulus griseus; identical to SEQ ID NO: 3508

SEQ ID NO: 7151 - DNA, 476 bp, Cricetulus griseus; identical to SEQ ID NO: 3509

SEQ ID NO: 7152 - DNA, 557 bp, Cricetulus griseus; identical to SEQ ID NO: 3510

SEQ ID NO: 7153 - DNA, 545 bp, Cricetulus griseus; identical to SEQ ID NO: 3511

SEQ ID NO: 7154 - DNA, 445 bp, Cricetulus griseus; identical to SEQ ID NO: 3512

SEQ ID NO: 7155 - DNA, 492 bp, Cricetulus griseus; identical to SEQ ID NO: 3513
  misc_feature (77)..(77): n is a, c, g, or t

SEQ ID NO: 7156 - DNA, 560 bp, Cricetulus griseus; identical to SEQ ID NO: 3514
  misc_feature (337)..(355): n is a, c, g, or t
  misc_feature (485)..(501): n is a, c, g, or t

SEQ ID NO: 7157 - DNA, 452 bp, Cricetulus griseus; identical to SEQ ID NO: 3515

SEQ ID NO: 7158 - DNA, 294 bp, Cricetulus griseus; identical to SEQ ID NO: 3516

SEQ ID NO: 7159 - DNA, 86 bp, Cricetulus griseus; identical to SEQ ID NO: 3517

SEQ ID NO: 7160 - DNA, 116 bp, Cricetulus griseus; identical to SEQ ID NO: 3518
  misc_feature (34)..(67): n is a, c, g, or t

SEQ ID NO: 7161 - DNA, 264 bp, Cricetulus griseus
ctcttccggatcaccccggatggaaatgtgctcggggagcaacaagaccaagaagaagaagtcatcaagagtaccacttgacaaatccaagcaccagacggaagcaccccccctccagagagagcttttttcaatggatgtcgactcacagacccctatgtttgatgtcagcatgacagctgacgcgctggatacacctcatatcactccagctccaagccagtgtagtactcccccaacaacttacccacaaccagtatctca

SEQ ID NO: 7162 - DNA, 505 bp, Cricetulus griseus; identical to SEQ ID NO: 3520

SEQ ID NO: 7163 - DNA, 600 bp, Cricetulus griseus
tgggcaggggtcactggggcccagctggtgagcagtccttggtaccaactgggacacctcagctcagcctgaggcaaagaggtatagggatatatcgctctcccagctttttttttttttaagtcaaattcaaactaaccagcccagctcagggcctaaaattcacaaaggctaggggccgttttacagtcaccatggatcaccgcacccgtcaaagagggggtttaggccttattcgagtctctgggactcaaatccgaccccccagggtcccgtttccgttccatgttgaccaggaggctagggaaggaaaaaaatgggaacgagagctaccacgtcataggcctgtcatttacggaccctcaaaaagggaggagctacaggataatattatgatttctaagccagcaccttactgggaaggaacagctgtgataaatggagaattcaaggagctgaaactgactgactatcgggggaaatacttatttttcttcttctacccactcgatttcactttggtatgtccaactggaaatattgccttcggtgaccgaattgaagaattcagatctataaatactgaaggggggcatgctt

SEQ ID NO: 7164 - DNA, 600 bp, Cricetulus griseus
  misc_feature (324)..(350): n is a, c, g, or t
actggggaaggaactggagtgaccgctcaatattctctggcattgggtctactgctgagcccgtttctcagtctaccacttctgattatcagtgggatgttagccgtaatcatccctatatcgatgatgaatggtctgggttaaatggtttgtcttctgctgaccccagctcagactggaacgcaccagcagaggagtgggggaactgggtagatgaagaaagagcttcacttctgaagtcccaggaacccatccctaatgaccaaagggtttcagatgatgataaagaaaagggagagggagctcttgcaactggaaaatccnnnnnnnnnnnnnnnnnnnnnnnnnnngcaaggtgaagacaactctctcacacaggacacagaagagctagaaaaggacattagagaagaacttcccatgaatacctccaaagcccgtccaaaacaggagagagctttttccttgaaaacattaacactattgacccagatgaagcactggtcaaaaatagccagcctatcaagactcttccacctgctattctctaccgagccatctgtcaccttatcacatggtgactctgacaagagctcttcc

SEQ ID NO: 7165 - DNA, 600 bp, Cricetulus griseus
cagggaaactgtccgactactttccaaaaccataccccaaccctgaggctgccagagctgctaacaatggagccttacccccggacctcagctacattgtgcgagctaggcatggtggtgaggactatgtattctccttgctcactggttactgtgagccccccactggggtgtcattgcgagaaggcctctacttcaacccttactttcctggccaggccattggtatggctcctcccatctacaatgaagtcttggagtatgatgatggtaccccagctaccatgtcacaaatagccaaggatgttgccaccttccttcgatgggcatcagagccagagcatgaccatcggaaacgaatggggctcaagatgttgttgataatgggcttgctgctgcccctgacctatgccatgaagcggcataaatggtcagttctgaagagtcgaaagctggcatatcggccacccaagtgaccctgtccagtgtctgcttgtcctcttgcctgaagaagccctcaacagcccaggaagtcctaggccttttcaggcctgctccttttcatccaatagaaggaaatggggtaggagaccaggctct

SEQ ID NO: 7166 - DNA, 496 bp, Cricetulus griseus
  misc_feature (33)..(56): n is a, c, g, or t
  misc_feature (66)..(88): n is a, c, g, or t
tattttactaaaaaaacctacgtgtaagggggnnnnnnnnnnnnnnnnnnnnnnnngccacacccnnnnnnnnnnnnnnnnnnnnnnngctcctggcactagccataatatgagttaggtttaccttagcatgaaacaaatmgagcycctttgygacctcwctgaargagaatmtgaactagtatytggatttaacgyasagtatgctgsaggcccattmgcrctattcttyatagctgaatatactaacatkaktctaataaatgccctatcaactattgtattcttaggsccrtacaakaatmtcaacacatccagaaatatwkactactaatkttatrcttawgacrctaatattaacctccctattcctatgaattcgagcatcctacccacgcactccgatgtgatcaactcatacacttactatgaaaaaactaactcccattaactttagccctatgtacgtgatatatttctatacctgaattcatag

SEQ ID NO: 7167 - DNA, 598 bp, Cricetulus griseus
  misc_feature (36)..(81): n is a, c, g, or t
  misc_feature (100)..(155): n is a, c, g, or t
  misc_feature (162)..(167): n is a, c, g, or t
  misc_feature (173)..(175): n is a, c, g, or t
  misc_feature (181)..(191): n is a, c, g, or t
  misc_feature (207)..(230): n is a, c, g, or t
  misc_feature (492)..(507): n is a, c, g, or t
ctccagcctaktacccacacatgacctagtggggannnnnnnnnnnnnnnnnnnnnnnnnnnnnnnnnnnnnnnnnnnnnncattattaaacacatcagnnnnnnnnnnnnnnnnnnnnnnnnnnnnnnnnnnnnnnnnnnnnnnnnnnnnnnnnargcgannnnnnataaannnaagcannnnnnnnnnnatcatcttardggtgnnnnnnnnnnnnnnnnnnnnnnnnagagtacttagaaacttctttttccatctcagacrgaayctatggatctacattctttatagcaacargttttcacggtctccatgtaatcattggaacatcattccttacagtatgcttattacgacaatttaaatttcactttacatcaaaacaccatttcggatttgaagccgcagcatggkactgacactttgtagatgttgtatgacttttcctttacgtatcaatctattgatgaggctcatamwwwmwgaaaaannnnnnnnnnnnnnnnccgcccccgggggggacccccagctttggtcccctttagaggggggaaatggcgccctgggggaaataagggccaaagctgttccctgggg

SEQ ID NO: 7168 - DNA, 567 bp, Cricetulus griseus
tttggactacacccatgacttcrcctcagctatagaaggccctacaccagtctcagctctactacactstagcactatagtagtagcawraatctttytactaakccgctwscacccaataatctcaaataataacactgcycwtactatcatattatgtttaggttccataacaacactattcacagctaatctgtgccgctcacacaaaatgatattgaaaaaatcgtacccttctcaacatcaaaccaattaggcctaataatagtaacatgaggaattaaccaaccacacctagcctttctacacatactgtacacacgcattcttcaaagctatgttattcatatgctccggatcaattatccatagcctaaatgatgaacaagacattcgataaataggaggactattaaaaccactaccattcacctcatcatgcttgataattggaagcctagccctaacaggaataccattgctaacaagcgtttattcaaaggacttaatgatcgaagccgcatacacctgttgtacaaacggcctgacccctatgatttacactcg

SEQ ID NO: 7169 - DNA, 180 bp, Cricetulus griseus
tgaaatgcaactctgactattgtacagttaattcctcactgaggactccaaacattcctgtgtttcacgtgtactgaagaacactgttgtgtgatgcttggtgtaaagttattgtgaaaattttattgtctttatttttaccaaagatttcccatagttcgaagcatttgaagcaataaa

SEQ ID NO: 7170 - DNA, 460 bp, Cricetulus griseus
  misc_feature (26)..(70): n is a, c, g, or t
taccactctagtagaatgaatctgannnnnnnnnnnnnnnnnnnnnnnnnnnnnnnnnnnnnnnnnnnnnttccatttcatcctaccattcattatcgctgccctagcaatggkccatcttctattcsyacatgaraccggctctaataacccaacaggcctagattctgacscagataaaattccatttcatccctactatactattaaagacctactargagccttcatgctattaattgctctcatwactttartattgtktttcccagatattttargagaccctgataattatactyctgcrwatccactcaatactcccgcacacattaaaccagartgatacttcctattcgcctacgctatcctacgatctatccctaataaactaggargagtcctarccctaatcctctctatcctaatcctagcaactctatcattactacacacatct

SEQ ID NO: 7171 - DNA, 581 bp, Cricetulus griseus; identical to SEQ ID NO: 584

SEQ ID NO: 7172 - DNA, 529 bp, Cricetulus griseus; identical to SEQ ID NO: 3530
  misc_feature (38)..(55): n is a, c, g, or t

SEQ ID NO: 7173 - DNA, 783 bp, Cricetulus griseus; identical to SEQ ID NO: 3531
  misc_feature (111)..(118): n is a, c, g, or t
  misc_feature (120)..(146): n is a, c, g, or t
  misc_feature (202)..(208): n is a, c, g, or t
  misc_feature (210)..(222): n is a, c, g, or t
  misc_feature (225)..(226): n is a, c, g, or t
  misc_feature (259)..(267): n is a, c, g, or t
  misc_feature (280)..(303): n is a, c, g, or t
  misc_feature (429)..(465): n is a, c, g, or t
  misc_feature (494)..(503): n is a, c, g, or t
  misc_feature (507)..(510): n is a, c, g, or t
  misc_feature (516)..(541): n is a, c, g, or t

SEQ ID NO: 7174 - DNA, 560 bp, Cricetulus griseus
  misc_feature (137)..(164): n is a, c, g, or t
  misc_feature (508)..(522): n is a, c, g, or t
tagttattgcagctattataattcaaacaccatgaagttttataggagcctcagcactaataawcgywcawggbyttacatcttmtmtactmtywtgtsttgmtaatactaactatgaacgtatscacagccgaacnnnnnnnnnnnnnnnnnnnnnnnnnnnngctytycccctyawagccctattttgattcttaggaagcctwactaacctarcccttccaccatcaatcaatytaattggagaattactaayctcaawttyactayyctcatgatcwaattttaccatcttattagtaggaactaacatcctaattacagccctatattcactatatatactaatwactwctcaacgaggtaagttaacaccacatataattaatctacaaccatcacacacacgagaacttaccttaataatactccacattacaccactttcacttttaatgattaacccaaaatttatcataggcaatacattataaaaaaaaaaagcttnnnnnnnnnnnnnnncgcccccccgcggggggcctccacttttggttccctta

SEQ ID NO: 7175 - DNA, 600 bp, Cricetulus griseus
agacaggcgatgccattacccggytmaarsaggtcctakagtacaatgctgtgggaggcaagtacaatcggggtttgactgtgttgcaagcataccgggagctggtggagccsadgaaacaggatgctgakagtcttcadcgggccctgacagygggcykgtgtgtagaactgctccaggctttctttcttgtgtcagatgacatcatgrattcctccctcactcgacgtggacagatctgctggtatcaraagccargcatargcttggatgccatcaatgatgctatgcttctggaagcctgcatctaccgcctactgaagttctactgcagggagcagccctactacctgaacctcctggagctctttctgcagagttcctatcagacggagattgggcagactctcgacctcatcacagcaccccakggccatgtggatcttgatagatacactgaaaagaggtacaaatctattgtcaagtacaagacagctttctattctttctacctgcctgttgcagctgccatgtacatggccggtattgatggggagaaggaacatgccaatgccaagaagatcctgctggagatgggag

SEQ ID NO: 7176 - DNA, 277 bp, Cricetulus griseus; identical to SEQ ID NO: 3534

SEQ ID NO: 7177 - DNA, 447 bp, Cricetulus griseus; identical to SEQ ID NO: 3535

SEQ ID NO: 7178 - DNA, 540 bp, Cricetulus griseus; identical to SEQ ID NO: 3536

SEQ ID NO: 7179 - DNA, 586 bp, Cricetulus griseus
tccgaatagatttccaaggcagaaggggttgaaggcaagcccatgactgctatcacgggccatgggcatggcagatgggcccagccattgctgtgcagagtgtagcaatagagagcccctcactgtcgcatggccctccccagagcatgcccaacccaggagtctgtctcattgtttatctaaccaccaagagagcccctcccttaaaacagtatgccctcacaaacctaccatgtgaatgaactgggaaaggggcatgacccccaggtgtgtatagctgtgagtttcaataatctagcactatgttggacccactccccttccacccagccagctttgctgtcagatacaagtcctgttccctgtttgtcctcttccagggactgtagcctggaggcttccacacagcccacacatctcttaggctccattataatcactttcctagagacgctggcctgtctgtgaaggctgagcttgtgtgtggtgttgggtttatgcctcctgctccctcccaccctgtatctgggcatagttcacatcaagtgtgtatccgccaggctccaggacctttctggatttgcca

SEQ ID NO: 7180 - DNA, 73 bp, Cricetulus griseus
ctcggggactgttgctattttccgattcttcaccctaatgtctaccgctttctattgtgttaagaaagggaat

SEQ ID NO: 7181 - DNA, 520 bp, Cricetulus griseus
  misc_feature (60)..(60): n is a, c, g, or t
  misc_feature (65)..(65): n is a, c, g, or t
  misc_feature (72)..(72): n is a, c, g, or t
  misc_feature (139)..(139): n is a, c, g, or t
  misc_feature (146)..(146): n is a, c, g, or t
  misc_feature (177)..(177): n is a, c, g, or t
  misc_feature (183)..(183): n is a, c, g, or t
  misc_feature (242)..(242): n is a, c, g, or t
  misc_feature (345)..(363): n is a, c, g, or t
  misc_feature (439)..(439): n is a, c, g, or t
  misc_feature (479)..(479): n is a, c, g, or t
tacgcctgcgcgcaccggcaggcgtctcgaggcgggtggtggacgatggcggcggcccangccgnggagganatgcggacgcgcgtggttctgggagagttcggggttcgcaacgtccacaccaccgacttccccggtnactactngggttacgacgacgcctgggaccaggaccgnttcganaagaatttccgtgtggatgttgttcatatggatgaaaatacactggagttcgacatggngggaattgatgctgccattgctaatgctttccggagaattctgttagctgaggtgccaacaatggcagtggaaaaggttctggtttataataacacatccatnnnnnnnnnnnnnnnnnnngctcaccgcctggggctcatccccattcttgctgatccacgtctgtttgaatataggaacccaggggaggaagaangaacggagatagacacactgcagtttcggctacaggtcangtgtaccaagaaccccaatgctgctaaggattcctctgatc

SEQ ID NO: 7182 - DNA, 421 bp, Cricetulus griseus
  misc_feature (276)..(276): n is a, c, g, or t
  misc_feature (341)..(341): n is a, c, g, or t
attctctctcagcccacaccctcgcttgttgtggaccataggcgcttaaaaaatcttttggagactgttgttaaaaaaagtcaggaatataatatattccaactggaaaacttgtatgcagttatcagccagtgcatttatgagcatcgcagggactatgacaaaacagctcttgttcagaaaatggagcaagcagtagaaaacttcaattgttccagatcatgatgtcattgcaccaagtatttttatattcaattcctatttgattgtcttcanatatgtccacataactgatgcaagataaaatgaaatcttgcattttgaagaaaaattaaaatagngaaagtattttaattccctggtacttatgtacatgtggtaagataactgataagtcttggatgtttgagcagaacactgt

SEQ ID NO: 7183 - DNA, 323 bp, Cricetulus griseus; identical to SEQ ID NO: 3541
  misc_feature (224)..(239): n is a, c, g, or t

SEQ ID NO: 7184 - DNA, 567 bp, Cricetulus griseus; identical to SEQ ID NO: 3542

SEQ ID NO: 7185 - DNA, 579 bp, Cricetulus griseus; identical to SEQ ID NO: 3543
  misc_feature (474)..(498): n is a, c, g, or t

SEQ ID NO: 7186 - DNA, 498 bp, Cricetulus griseus; identical to SEQ ID NO: 3544
  misc_feature (135)..(156): n is a, c, g, or t
  misc_feature (161)..(214): n is a, c, g, or t
  misc_feature (246)..(297): n is a, c, g, or t
  misc_feature (321)..(371): n is a, c, g, or t
  misc_feature (382)..(396): n is a, c, g, or t
  misc_feature (398)..(412): n is a, c, g, or t
  misc_feature (414)..(447): n is a, c, g, or t

SEQ ID NO: 7187 - DNA, 579 bp, Cricetulus griseus; identical to SEQ ID NO: 3545

SEQ ID NO: 7188 - DNA, 571 bp, Cricetulus griseus
  misc_feature (396)..(512): n is a, c, g, or t
gtagctgccaagaccaagggccctgcaggggaccgagtccggccactaagtgcccgcagtgagcctgcagacaagccaggccgtgtgcccctcaccaggaagccctcagtccccaagactgtctcaaaagtgtctcctgccacgaggacctcctctgggctcagtggccgcccagtgccacctggggctggctcccctgtctacctggacctggcttacctgcctgggggtggcgcgggccacctggacccggactttttccttcgagtacgtgcactctgctatgtcatcagtgggcagggccagcgccaggaagagggcctgcgggccgtgttggatgcactgctggctggcaagcagcagtgggaccttgacctgcaggtcacactgatcccnnnnnnnnnnnnnnnnnnnnnnnnnnnnnnnnnnnnnnnnnnnnnnnnnnnnnnnnnnnnnnnnnnnnnnnnnnnnnnnnnnnnnnnnnnnnnnnnnnnnnnnnnnnnnnnnnnnnnccctgcctgcatagtggagttctagccacgggccacagcacaccctgaggacagcagct

SEQ ID NO: 7189 - DNA, 355 bp, Cricetulus griseus; identical to SEQ ID NO: 3547

SEQ ID NO: 7190 - DNA, 216 bp, Cricetulus griseus; identical to SEQ ID NO: 3548

SEQ ID NO: 7191 - DNA, 567 bp, Cricetulus griseus; identical to SEQ ID NO: 3549

SEQ ID NO: 7192 - DNA, 550 bp, Cricetulus griseus; identical to SEQ ID NO: 3550

SEQ ID NO: 7193 - DNA, 472 bp, Cricetulus griseus; identical to SEQ ID NO: 3551

SEQ ID NO: 7194 - DNA, 600 bp, Cricetulus griseus; identical to SEQ ID NO: 3552

SEQ ID NO: 7195 - DNA, 479 bp, Cricetulus griseus; identical to SEQ ID NO: 3553

SEQ ID NO: 7196 - DNA, 440 bp, Cricetulus griseus; identical to SEQ ID NO: 3554

SEQ ID NO: 7197 - DNA, 377 bp, Cricetulus griseus; identical to SEQ ID NO: 3555

SEQ ID NO: 7198 - DNA, 328 bp, Cricetulus griseus; identical to SEQ ID NO: 3556
  misc_feature (37)..(51): n is a, c, g, or t
  misc_feature (198)..(198): n is a, c, g, or t
  misc_feature (249)..(249): n is a, c, g, or t

SEQ ID NO: 7199 - DNA, 580 bp, Cricetulus griseus; identical to SEQ ID NO: 3557
  misc_feature (342)..(364): n is a, c, g, or t

SEQ ID NO: 7200 - DNA, 128 bp, Cricetulus griseus; identical to SEQ ID NO: 3558

SEQ ID NO: 7201 - DNA, 512 bp, Cricetulus griseus; identical to SEQ ID NO: 3559
  misc_feature (332)..(392): n is a, c, g, or t

SEQ ID NO: 7202 - DNA, 579 bp, Cricetulus griseus; identical to SEQ ID NO: 3560
  misc_feature (522)..(522): n is a, c, g, or t

SEQ ID NO: 7203 - DNA, 566 bp, Cricetulus griseus; identical to SEQ ID NO: 3561

SEQ ID NO: 7204 - DNA, 553 bp, Cricetulus griseus; identical to SEQ ID NO: 3562

SEQ ID NO: 7205 - DNA, 312 bp, Cricetulus griseus; identical to SEQ ID NO: 3563

SEQ ID NO: 7206 - DNA, 475 bp, Cricetulus griseus; identical to SEQ ID NO: 3564

SEQ ID NO: 7207 - DNA, 409 bp, Cricetulus griseus; identical to SEQ ID NO: 3565

SEQ ID NO: 7208 - DNA, 489 bp, Cricetulus griseus; identical to SEQ ID NO: 3566

SEQ ID NO: 7209 - DNA, 350 bp, Cricetulus griseus; identical to SEQ ID NO: 3567
  misc_feature (69)..(105): n is a, c, g, or t

SEQ ID NO: 7210 - DNA, 264 bp, Cricetulus griseus; identical to SEQ ID NO: 3568

SEQ ID NO: 7211 - DNA, 480 bp, Cricetulus griseus; identical to SEQ ID NO: 3569

SEQ ID NO: 7212 - DNA, 286 bp, Cricetulus griseus; identical to SEQ ID NO: 3570

SEQ ID NO: 7213 - DNA, 420 bp, Cricetulus griseus; identical to SEQ ID NO: 3571

SEQ ID NO: 7214 - DNA, 540 bp, Cricetulus griseus; identical to SEQ ID NO: 3572
  misc_feature (307)..(307): n is a, c, g, or t
  misc_feature (381)..(402): n is a, c, g, or t
  misc_feature (477)..(477): n is a, c, g, or t

SEQ ID NO: 7215 - DNA, 555 bp, Cricetulus griseus
agcccatcttcacactacggaagaagctgtttttccctcctaagtgatgtgtgctctacatggttgacattatgtcagtctatgcacttttgtttggggggaggggtgggttttaatttattttttatgatttcttttattttgagatattatatcatttacctcttccctttcctccctgaaaagttggaatttgaagtccaaagcagaagcttgataaatggaacatcagttctaagtaaggtggcactctgaagccaggaaggttgtacgctaaccttactggcttctatttactagctccatgtctgtctgacagaacgtttaatttctgtaaacattaggctccacatcagtaaagtaggagcaatgaatttctagatcagcaaagcccttagcacaggcatggtatgtgctaaatgctcagcagcactctggccattttactgtttcttcctagttgaaatggatgtgttcccattctgacgccctgtaaacagggattgtgttcattatttctgtggttactggtgggtattaaaggtgggtgaatgc

SEQ ID NO: 7216 - DNA, 548 bp, Cricetulus griseus
gtcatcctctctcatggctgccaggccagccacctgcagttcccaggtgccgtctatggcacagacggatgctccgtgtcggtcgagaagattgtgaacatcttcagtgggactggctgtcctagcctgggagggaagccgaagctgttcttcatccaggcctgtggtggcgagcagaaagaccatggctttgaggtggcctgcacttcctctcgaggcagggacttagacagtgactctgagccagatgctgtcccataccaggaaggcccaaggccctttgaccagctggatgccgtgtcaagtttgcccacccccagcgacatccttgtatcctattccaccttcccaggttttgtctcctggagagacaagaagagcggctcctggtacatagagaccttggatggtgtcctggagcagtgggctcactctgaagacctgcagtccctccttctcagggtcgcccatgcagtttctgagaaagggatttataaacagattcctggctgttttaacttcctccggaaaaagctgttttttaaaac

SEQ ID NO: 7217 - DNA, 550 bp, Cricetulus griseus
agacccccagtgccatcaatggcaacccatcctggcacctggcggacagccccgcggtaaatggagccactggccacagcagcagtttggatgcacgggaggtgatccccatggcagccgtaaagcaagcgctgagagaggccggcgatgagtttgagctgcggtaccggcgggcgttcagtgatctaacatcccagcttcatataaccccagggactgcatatcaaagctttgaacaggtagtgaatgaactcttccgggatggggtaaactggggtcgcattgtggcctttttctccttcggtggagccctctgtgtggaaagcgtagacaaggagatgcaggtattggtgagtcggatcgcaagttggatggccacctacctgaatgaccacctagagccttggatccaggacaacggcggctgggacactttcgtggaactctacggaaacaatgcagcagctgagagccggaaaggccaggagcgcttcaaccgctggttcctgacgggcatgactgtggctggtgtggttctgctgggctctct

SEQ ID NO: 7218 - DNA, 391 bp, Cricetulus griseus; identical to SEQ ID NO: 3576

SEQ ID NO: 7219 - DNA, 600 bp, Mus musculus
acacgggaaacctcacccggcccggacacggacaggattgacagattgatagctctttctcgattccgtgggtggtggtgcatggccgttcttagttggtggagcgatttgtctggttaattccgataacgaacgagactctggcatgctaactagttacgcgacccccgagcggtcggcgtcccccaacttcttagagggacaagtggcgttcagccacccgagattgagcaataacaggtctgtgatgcccttagatgtccggggctgcacgcgcgctacactgactggctcagcgtgtgcctaccctgcgccggcaggcgcgggtaacccgttgaaccccattcgtgatggggatcggggattgcaattattccccatgaacgaggaattcccagtaagtgcgggtcataagcttgcgttgattaagtccctgccctttgtacacaccgcccgtcgctactaccgattggatggtttagtgaggccctcggatcggccccgccggggtcggcccacggccctggcggagcgctgagaagacggtcgaacttgactatctagaggaagtaaaagtcgtaacaaggtttccgtaggtga

SEQ ID NO: 7220 - DNA, 620 bp, Rattus norvegicus
caacacgggaaacctcacccggcccggacacggacaggattgacagattgatagctctttctcgattccgtgggtggtggtgcatggccgttcttagttggtggagcgatttgtctggttaattccgataacgaacgagactctggcatgctaactagttacgcgacccccgagcggtcggcgtcccccaacttcttagagggacaagtggcgttcagccacccgagattgagcaataacaggtctgtgatgcccttagatgtccggggctgcacgcgcgctacactgactggctcagcgtgtgcctaccctacgccggcaggcgcgggtaacccgttgaaccccattcgtgatggggatcggggattgcaattattccccatgaacgaggaattcccagtaagtgcgggtcataagcttgcgttgattaagtccctgccctttgtacacaccgcccgtcgctactaccgattggatggtttagtgaggccctcggatcggccccgccggggtcggcccacggccttgcggagcgctgagaagacggtcgaacttgactatctagaggaagtaaaagtcgtaacaaggtttccgtaggtgaacctgcggaaggatcatta

SEQ ID NO: 7221 - DNA, 600 bp, Mus musculus
atcctgccagtagcatatgcttgtctcaaagattaagccatgcatgtctaagtacgcacggccggtacagtgaaactgcgaatggctcattaaatcagttatggttcctttggtcgctcgctcctctcctacttggataactgtggtaattctagagctaatacatgccgacgggcgctgaccccccttcccggggggggatgcgtgcatttatcagatcaaaaccaacccggtgagctccctcccggctccggccgggggtcgggcgccggcggcttggtgactctagataacctcgggccgatcgcacgccccccgtggcggcgacgacccattcgaacgtctgccctatcaactttcgatggtagtcgccgtgcctaccatggtgaccacgggtgacggggaatcagggttcgattccggagagggagcctgagaaacggctaccacatccaaggaaggcagcaggcgcgcaaattacccactcccgacccggggaggtagtgacgaaaaataacaatacaggactctttcgaggccctgtaattggaatgagtccactttaaatcctttaacgaggatccattggagggcaagtct

SEQ ID NO: 7222 - DNA, 620 bp, Rattus norvegicus
tacctggttgatcctgccagtagcatatgcttgtctcaaagattaagccatgcatgtctaagtacgcacggccggtacagtgaaactgcgaatggctcattaaatcagttatggttcctttgtcgctcgctcctctcctacttggataactgtggtaattctagagctaatacatgccgacgggcgctgaccccccttcccgtgggggggacgcgtgcatttatcagatcaaaaccaacccggtcagccccctcccggctccggccgggggtcgggcgccggacggctttggtgactctagataacctcgggccgatcgcacgccctccgtggcggcgacgacccattcgaacgtctgccctatcaactttcgatggtagtcgccgtgcctaccatggtgaccacgggtgacggggaatcagggttcgattccggagagggagcctgagaaacggctaccacatccaaggaaggcagcaggcgcgcaaattacccactcccgacccggggaggtagtgacgaaaaataacaatacaggactctttcgaggccctgtaattggaatgagtccactttaaatcctttaacgaggatccattggagggcaagtctggtgccag

SEQ ID NO: 7223 - DNA, 600 bp, Mus musculus
ttccagctccaatagcgtatattaaagttgctgcagttaaaaagctcgtagttggatcttgggagcgggcgggcggtccgccgcgaggcgagtcaccgcccgtccccgccccttgcctctcggcgccccctcgatgctcttagctgagtgtcccgcggggcccgaagcgtttactttgaaaaaattagagtgttcaaagcaggcccgagccgcctggataccgcagctaggaataatggaataggaccgcggttctattttgttggttttcggaactgaggccatgattaagagggacggccgggggcattcgtattgcgccgctagaggtgaaattcttggaccggcgcaagacggaccagagcgaaagcatttgccaagaatgttttcattaatcaagaacgaaagtcggaggttcgaagacgatcagataccgtcgtagttccgaccataaacgatgccgactggcgatgcggcggcgttattcccatgacccgccgggcagcttccgggaaaccaaagtctttgggttccggggggagtatggttgcaaagctgaaacttaaaggaattgacggaagggcaccaccaggagtgggc

SEQ ID NO: 7224 - DNA, 620 bp, Rattus norvegicus
gcggtaattccagctccaatagcgtatattaaagttgctgcagttaaaaagctcgtagttggatcttgggagcgggcgggcggtccgccgcgaggcgagtcaccgcccgtccccgccccttgcctctcggcgccccctcgatgctcttagctgagtgtcccgcggggcccgaagcgtttactttgaaaaaattagagtgttcaaagcaggcccgagccgcctagataccgcagctaggaataatggaataggaccgcggttctattttgttggttttcggaactgaggccatgattaagagggacggccgggggcattcgtattgcgccgctagaggtgaaattcttggaccggcgcaagacggaccagagcgaaagcatttgccaagaatgttttcattaatcaagaacgaaagtcggaggttcgaagacgatcagataccgtcgtagttccgaccataaacgatgccgactggcgatgcggcggcgttattcccatgacccgccgggcagcttccgggaaaccaaagtctttgggttccggggggagtatggttgcaaagctgaaacttaaaggaattgacggaagggcaccaccaggagtgggcctgcggcttaatt

SEQ ID NO: 7225 - DNA, 616 bp, Cricetinae gen. sp.
  misc_feature (51)..(69): n is a, c, g, or t
  misc_feature (578)..(593): n is a, c, g, or t
cctaacttgcgcagaaaaaaaatgagacaacattggcatggctttgttttnnnnnnnnnnnnnnnnnnnggttttttaaaattttttttaaaaaaggttttgttttggcgcttttgactcaggatttaaaaactggaacggtgaaggcgacagcagtcttggagcaagcatcccccaaagttttacaatgtggctgaggactttgattgtacatttttttttcttttttaagtcattccaagtacccatgagatggctacaggaagtccctcaccctcccaaaagccaccccaattccctagaggaggatggctgagtccatgccctgagtccacactggggaggtgacagcattgcttctgtgtaaattatgtactgcgaaaattttttttaaatcttccgccttaatacttttttagttttgtttttatttttgaatggtcagccatcgtgaccctcatgggtgtttttttttgtccccccaacttgagtatgaaggctttggtctcccctgggagtgggttgaggtgttgaggcagccagaggggcttgcctgtacactgacttgagaccagttnnnnnnnnnnnnnnnnttacaaaccgtaaaaaaaaaaaa

SEQ ID NO: 7226 - DNA, 331 bp, Mus musculus
actacattcaattccatcatgaagtgtgacgttgacatccgtaaagacctctatgccaacacagtgttgtctggtggtaccaccatgtacccaggcattgctgacaggatgcagaaggagattactgctctggctcctagcaccatgaagatcaagatcattgctcctcctgagcgcaagtactctgtgtggatcggtggctccatcttggcctcactgtccaccttccagcagatgtggatcagcaagcaggagtacgatgagtccggcccctccatcgtgcaccgcaagtgcttctaggcggactgttactgagctgcgttttacaccc

SEQ ID NO: 7227 - DNA, 597 bp, Rattus norvegicus
atgagacatttggcatggctttattgtttttttgttttttgtttttgttttttttaaattttttttttaaaaaggttttttttttttgttttgttttggcgcttttgactcaaggatttaaaaactggaacggtgaaggcgaccgcagttggttggagcaaacatcccccaaagttctacaatgtggctgaggactttgattgtacattgttttttgtttttggtttttttaatagtcactccaagtatccacggcatagatggttacaggaagtccctcaccctcccaaaagccacccccaactcctaaggggaggatggctgcatccatgccctgagtccacaccgggaaggtgacagcattgcttctgtgtaaattatgtacttgcaaacatttttttaaatcttccgccttaatacttcatttttgtttttaatttctgaatggtcagccattcgtggcctgccccttttttttgtccccccaacttgatgtatgaaggctttggtctccctgggagtggtttgaggtgttgaggcgccagggctggcctgtacactgacgtgagaccgttttaataaaagtgcacaccttac

SEQ ID NO: 7228 - DNA, 615 bp, Cricetinae gen. sp.
gagcacagacctctcgcagctctttcttcgccgctccacacccgccaccagttcgccatggatgacgatatcgctgcgctcgttgtcgacaacggctccggcatgtgcaaagccggcttcgcgggcgacgatgctccccgggccgtcttcccctccatcgtgggccgccctaggcaccagggcgtgatggtgggcatgggccagaaggactcgtacgtgggtgacgaggcccagagcaagagaggtatyctgaccctgaagtaycccattgarcacggcattgtcaccaactgggacgayatggagaagatctggcaccacaccttytacaaygarctgcgtgtggccccygaggagcaccckgtgctkctsacygaggcccccctgaacccyaaggccaaccgtgaaaagatgacccagatcatgtttgagaccttcaacaccccagccatgtacgtagccattcaggccgtgctgtccctgtatgcctctggtcgtaccactggcattgtgatggactccggagacggggtcacccacactgtgcccatctatgagggctacgctctccctcatgccatcctgcgtctggacctggctggmcgggacctkmca

SEQ ID NO: 7229 - DNA, 330 bp, Mus musculus
atggtgggaatgggtcagaaggactcctatgtgggtgacgaggcccagagcaagagaggtatcctgaccctgaagtaccccattgaacatggcattgttaccaactgggacgacatggagaagatctggcaccacaccttctacaatgagctgcgtgtggcccctgaggagcaccctgtgctgctcaccgaggcccccctgaaccctaaggccaaccgtgaaaagatgacccagatcatgtttgagaccttcaacaccccagccatgtacgtagccatccaggctgtgctgtccctgtatgcctctggtcgtaccacgggcattgtgatg

SEQ ID NO: 7230 - DNA, 597 bp, Rattus norvegicus
atggatgacgatatcgctgcgctcgtcgtcgacaacggctccggcatgtgcaaggccggcttcgcgggcgacgatgctccccgggccgtcttcccctccatcgtgggccgccctaggcaccagggtgtgatggtgggtatgggtcagaaggactcctacgtgggcgacgaggcccagagcaagagaggcatcctgaccctgaagtaccccattgaacacggcattgtaaccaactgggacgatatggagaagatttggcaccacactttctacaatgagctgcgtgtggcccctgaggagcaccctgtgctgctcaccgaggcccctctgaaccctaaggccaaccgtgaaaagatgacccagatcatgtttgagaccttcaacaccccagccatgtacgtagccatccaggctgtgttgtccctgtatgcctctggtcgtaccactggcattgtgatggactccggagacggggtcacccacactgtgcccatctatgagggttacgcgctccctcatgccatcctgcgtctggacctggctggccgggacctgacagactacctcatgaagatcctgaccgagcgtggctacagc

SEQ ID NO: 7231 - DNA, 615 bp, Cricetinae gen. sp.
gmctwcctymtkaagwtcctgaccgagcgtggctacagcttcaccaccacagccgagagggaaattgtgcgtgacatcaaagagaagctgtgctatgttgccctggacttcgagcaagagatggccactgccgcatcctcttcctccctggagaagagctatgagctgcctgatggccaggtcatcaccattggcaacgagcggttccgttgccctgaggcycttttccagccttccttcctgggtatggaatcctgtggcatccacgaaactacattcaactccatcatgaagtrtgacgtygacatccgmaaagacctctatsccaacacagtgctgtctggtggyaccaccatgtacccaggcattgctgaccggatgcagaaggagatcactgctctggctcccagcaccatgaagatcaagatcattgctccycctgagcgcaagtactctgtgtggatcggtggctccatcctggcctcactgtccaccttccagcagatgtggatcagcaagcaggagtacgatgagtccggcccctccatcgtccaccgcaaatgcttctaggcggactgttactgagctgcgttttacaccctttctttgacaaaa

SEQ ID NO: 7232 - DNA, 330 bp, Mus musculus
ccacactgtgcccatctacgagggctatgctctccctcacgccatcctgcgtctggacttggctggccgggacctgacggactacctcatgaagatcctgaccgagcgtggctacagcttcaccaccacagctgagagggaaatcgtgcgtgacatcaaagagaagctgtgctatgttgctctagacttcgagcaggagatggccactgccgcatcctcttcctccctggagaagagctatgagctgcctgacggccaagtcatcactattggcaacgagcggttccgatgccctgaggctcttttccagccttccttcttgggtatgga

SEQ ID NO: 7233 - DNA, 597 bp, Rattus norvegicus
tcaccaccacagctgagagggaaatcgtgcgtgacattaaagagaagctgtgctatgttgccctagacttcgagcaagagatggccactgccgcatcctcttcctccctggagaagagctatgagctgcctgacggtcaggtcatcactatcggcaatgagcggttccgatgccccgaggctctcttccagccttccttcctgggtatggaatcctgtggcatccatgaaactacattcaattccatcatgaagtgtgacgttgacatccgtaaagacctctatgccaacacagtgctgtctggtggcaccaccatgtacccaggcatcgctgacaggatgcagaaggagattactgccctggctcctagcaccatgaagatcaagatcattgctcctcctgagcgcaagtactctgtgtggattggtggctctatcctggcctcactgtccaccttccagcagatgtggatcagcaagcaggagtacgatgagtccggcccctccatcgtgcaccgcaaatgcttctaggcggactgttactgagctgcgttttacaccctttctttgacaaaacctaacttgcgcagaaaaaaaa

SEQ ID NO: 7234 - DNA, 334 bp, Escherichia coli
tgatgtcgatgcctttgattttattcgcaccattgcggtcgcgcggatcatgatgccaacctcttacgtgcgcctttctgccggacgcgagcagatgaacgaacagactcaggcgatgtgctttatggcaggcgcaaactcgattttctacggttgcaaactgctgaccacgccgaatccggaagaagataaagacctgcaactgttccgcaaactggggctaaatccgcagcaaactgccgtgctggcaggggataacgaacaacagcaacgtcttgaacaggcgctgatgaccccggacaccgacgaatattacaacgcggcagcattatga

SEQ ID NO: 7235 - DNA, 334 bp, Escherichia coli
atggctcaccgcccacgctggacattgtcgcaagtcacagaattatttgaaaaaccgttgctggatctgctgtttgaagcgcagcaggtgcatcgccagcatttcgatcctcgtcaggtgcaggtcagcacgttgctgtcgattaagaccggagcttgtccggaagattgcaaatactgcccgcaaagctcgcgctacaaaaccgggctggaagccgagcggttgatggaagttgaacaggtgctggagtcggcgcgcaaagcgaaagcggcaggatcgacgcgcttctgtatgggcgcggcgtggaagaatccccacgaacgcgatatgccgt

SEQ ID NO: 7236 - DNA, 333 bp, Escherichia coli
ggggtaaaagcgatggggctggaggcgtgtatgacgctgggcacgttgagtgaatctcaggcgcagcgcctcgcgaacgccgggctggattactacaaccacaacctggacacctcgccggagttttacggcaatatcatcaccacacgcacttatcaggaacgcctcgatacgctggaaaaagtgcgcgatgccgggatcaaagtctgttctggcggcattgtgggcttaggcgaaacggtaaaagatcgcgccggattattgctgcaactggcaaacctgccgacgccgccggaaagcgtgccaatcaacatgctggtgaaggtgaaaggc

SEQ ID NO: 7237 - DNA, 337 bp, Escherichia coli
accacgctggtgcagggatcgttacccgaactgcatcaggcgtggcaggcggtggacgagcgtccgcatgctaatcgctttttaccgccagatgaaatcgaacagtcgctgaacggcgtgcattatcaacatcatattcagcccatcacgctgtggtttgatgatgcgctcagtgccatgcgttcgctgaaaggcatcggtgccacgcatcttcatgaagggcgcgacccgcgaatattaacgcgttcgcagttgcagcgattgcaactggcctggccgcaacagcaggggcgatatcctctgacgtatcatctttttttgggagtgattgctcgtg

SEQ ID NO: 7238 - DNA, 415 bp, Escherichia coli
atggcaacggttaataaacaagccattgcagcggcatttggtcgggcagccgcacactatgagcaacatgcagatctacagcgccagagtgctgacgccttactggcaatgcttccacagcgtaaatacacccacgtactggacgcgggttgtggacctggctggatgagccgccactggcgggaacgtcacgcgcaggtgacggccttagatctctcgccgccaatgcttgttcaggcacgccagaaggatgccgcagaccattatctggcgggagatatcgaatccctgccgttagcgactgcgacgttcgatcttgcatggagcaatctcgcagtgcagtggtgcggtaatttatccacggcactccgcgagctgtatcgggtggtgcgccccaaaggcgtggtcgcgttta

SEQ ID NO: 7239 - DNA, 339 bp, Escherichia coli
acaacaggctgactgggtgttagtggaaggtgctggcggctggtttacgccgctttctgacactttcacttttgcagattgggtaacacaggaacaactgccggtgatactggtagttggtgtgaaactcggctgtattaatcacgcgatgttgactgcacaggtaatacaacacgccggactgactctggcgggttgggtggcgaacgatgttacgcctccgggaaaacgtcacgctgaatatatgaccacgctcacccgcatgattcccgcgccgctgctgggagagatcccctggcttgcagaaaatccagaaaatgcggcaaccggaaagtacat

SEQ ID NO: 7240 - DNA, 285 bp, Escherichia coli
ttattttgtcaccggaacggataccgaagtggggaaaactgtcgccagttgtgcacttttacaagccgcaaaggcagcaggctaccggacggcaggttataaaccggtcgcctctggcagcgaaaagaccccggaaggtttacgcaatagcgacgcgctggcgttacagcgcaacagcagcctgcagctggattacgcaacagtaaatccttacaccttcgcagaacccacttcgccgcacatcatcagcgcgcaagagggcagaccgatagaatcattggtaat

SEQ ID NO: 7241 - DNA, 468 bp, Enterobacteria phage P1
gacggtgggagaatgttaatccatattggcagaacgaaaacgctggttagcaccgcaggtgtagagaaggcacttagcctgggggtaactaaactggtcgagcgatggatttccgtctctggtgtagctgatgatccgaataactacctgttttgccgggtcagaaaaaatggtgttgccgcgccatctgccaccagccagctatcaactcgcgccctggaagggatttttgaagcaactcatcgattgatttacggcgctaaggatgactctggtcagagatacctggcctggtctggacacagtgcccgtgtcggagccgcgcgagatatggcccgcgctggagtttcaataccggagatcatgcaagctggtggctggaccaatgtaaatattgtcatgaactatatccgtaacctggatagtgaaacaggggcaatggtgcgcctgctggaagatgccgattag

SEQ ID NO: 7242 - DNA, 528 bp, Enterobacteria phage P1
atgtccaatttactgaccgtacaccaaaatttgcctgcattaccggtcgatgcaacgagtgatgaggttcgcaagaacctgatggacatgttcagggatcgccaggcgttttctgagcatacctggaaaatgcttctgtccgtttgccggtcgtgggcggcatggtgcaagttgaataaccggaaatggtttcccgcagaacctgaagatgttcgcgattatcttctatatcttcaggcgcgcggtctggcagtaaaaactatccagcaacatttgggccagctaaacatgcttcatcgtcggtccgggctgccacgaccaagtgacagcaatgctgtttcactggttatgcggcggatccgaaaagaaaacgttgatgccggtgaacgtgcaaaacaggctctagcgttcgaacgcactgatttcgaccaggttcgttcactcatggaaaatagcgatcgctgccaggatatacgtaatctggcatttctggggattgcttataacaccctgttacgtatagccgaa

SEQ ID NO: 7243 - DNA, 594 bp, Bacillus subtilis
gtcaaacaggaaaaaaaagtaatgatatgcgatttgacagaagcggaactctcttctaacggtacggtcagtttgcgtaaagaagaagcagctgaagcagcccgcatattaggcgcagataaaagaattcagctaacgcttccagaccgcggcctaataatgagtgatcaggcaattcggtcaattgtcactgtcatcagaatctgtcggccaaaagcggtttttatgccgtataaaaaggatcgccatccggatcacggcaatgcggctgcactggtggaagaagcgatcttttccgccggaatccataaatataaagacgaaaaaagccttccggcgcataaagtcagcaaggtttactattatatgataaatggttttcatcagccggattttgttattgatatctcggatacaatagaggcaaagaaacaaagcctcaacgcctacaaaagccagtttatcccgtcaaaggattccgtttctactcctctgacgaatgggtatattgaaatcgttgaagcgagagaaaagctttacggtaaagaagcgggcgtggagtatgccgaagtttcttttccaaacggatgctga

SEQ ID NO: 7244 - DNA, 612 bp, Bacillus subtilis
atgtcaaacgaaacaattaaattagtcattgcgggaccgcgtggaagaatggggcaggaagctgttaaattggcagaacgaacaccacattttgaccttgtaggggccatagaccatacatacgatcagcaaaaattatctgatgtgatgcctgttgagtcagatgctttcatttacacagatatccatgcctgttttacagaaacacaaccggatgtcttgattgatttaacaacgcccgaaatcggaaaagtacatacaaaaattgcattagagcacggagtccgtccagttgtcggaacaaccggtttctcagaagctgatttaaaagagctcacatctttaacagaagaaaaagggatcggagccatcatcgcgccaaattttgcgctcggtgcgatactgatgatgaaattttcaaaaatggctgccaactattttgaggatgttgagattattgagcttcatcatgaccagaagcttgacgcaccaagcggaactgcgcttaaaacagcggaaatgatttcagaagtccgtaaagaaaagcagcaaggacatccggatgaaaaagaaattctcccaggagcaagaggagcggagcaaaacggtatt

SEQ ID NO: 7245 - DNA, 594 bp, Bacillus subtilis
acgccatgattcttataaccgtgcttctttcatgtcaggcgttaaactgtcagtcgaacaagtcatgaagattgatcagcttgtgtatggtttagaaaatatcattgattagacggggggataaacaatgaaaattgctttgatcgcgcatgacaagaaaaaacaggatatggttcaatttacgactgcctatcgggatattttaaagaatcatgatctatacgcaaccggaaccacagggttgaaaattcatgaggcgacaggtcttcaaattgaacgttttcaatccggccctttagggggagaccagcaaatcggtgcactgatcgctgccaatgcactcgatcttgtcatttttttgcgcgacccgctgaccgcgcagccgcatgaaccggatgtctcggcattaatccgtttatgtgatgtgtattccattccgctcgccacaaatatgggtactgcggaaattcttgtgcgcacacttgatgaaggtgttttcgaattccgtgaccttcttcggggagaagagccgaatgtataatgctgacgttcttgcttttggcgcccacagtgatgatgtcgagatcggaatgg

SEQ ID NO: 7246 - DNA, 397 bp, Cricetus cricetus
gcccactgaagggcatcctgggctacaccgaggaccaggttgtctcctgcgacttcaacagtgactcccactcttccacctttgatgctggggctggcattgctctcaatgacaactttgtaaagctcatttcctggtatgacaatgaatttggctacagcaacagagtggtggacctcatggcctacatggcctccaaggagtaagaagcccaccctggaccatccaccccagcaaggactcgagcaagagggaggccctggctgctgagcagtccctgtccaataacccccacaccgatcatctccctcacagtttccatcccagacccccagaataaggaggggcttagggagccctactctcttgaataccatcaataaagttcactgcaccc

SEQ ID NO: 7247 - DNA, 350 bp, Mus musculus
aagggcatcttgggctacactgaggaccaggttgtctcctgcgacttcaacagcaactcccactcttccaccttcgatgccggggctggcattgctctcaatgacaactttgtcaagctcatttcctggtatgacaatgaatacggctacagcaacagggtggtggacctcatggcctacatggcctccaaggagtaagaaaccctggaccacccaccccagcaaggacactgagcaagagaggccctatcccaactcggcccccaacactgagcatctccctcacaatttccatcccagacccccataataacaggaggggcctagggagccctccctactctcttgaa

SEQ ID NO: 7248 - DNA, 401 bp, Rattus norvegicus
taaagggcatcctgggctacactgaggaccaggttgtctcctgtgacttcaacagcaactcccattcctccacctttgatgctggggctggcattgctctcaatgacaactttgtgaagctcatttcctggtatgacaatgaatatggctacagcaacagggtggtggacctcatggcctacatggcctccaaggagtaagaaacccctggaccacccagcccagcaaggatactgagagcaagagagaggccctcagttgcctgagagtccccatcccaactcagcccccaacactgagcactctccctcacaattccatcccagaccccataacaacaggaggggcctggggagccctcccttctctcgaataccatcaataaagttcgctgcaccctc

SEQ ID NO: 7249 - DNA, 398 bp, Cricetus cricetus
atggtgaaggtcggcgtgaacggatttggccgtattggacgcctggttaccagggctgccttcacttctggcaaagtggaagttgttgccatcaatgaccccttcattgacctcaactacatggtctacatgttccagtatgactctacccatggcaagttcaaaggcacagtcaaggctgagaatggaaagcttgtcatcaacgggaaggccatcaccatcttccaggagcgagatcccgccaacatcaaatggggtgatgctggcgccgagtatgttgtggaatctactggcgtcttcaccaccatggagaaggctggggcccacttgaagggcggggccaagagggtcatcatctccgccccttctgctgatgcccccatgtttgtgatgggtgt

SEQ ID NO: 7250 - DNA, 370 bp, Mus musculus
atggtgaaggtcggtgtgaacggatttggccgtattgggcgcctggtcaccagggctgccatttgcagtggcaaagtggagattgttgccatcaacgaccccttcattgacctcaactacatggtctacatgttccagtatgactccactcacggcaaattcaacggcacagtcaaggccgagaatgggaagcttgtcatcaacgggaagcccatcaccatcttccaggagcgagaccccactaacatcaaatggggtgaggccggtgctgagtatgtcgtggagtctactggtgtcttcaccaccatggagaaggccggggcccacttgaagggtggagccaaacgggtcatcatctccgccccttctg

SEQ ID NO: 7251 - DNA, 401 bp, Rattus norvegicus
atggtgaaggtcggtgtcaacggatttggccgtattggccgcctggtcaccagggctgccttctcttgtgacaaagtggacattgttgccatcaacgaccccttcattgacctcaactacatggtctacatgttccagtatgattctacccacggcaagttcaatggcacagtcaaggctgagaatgggaagctggtcatcaatgggaaacccatcaccatcttccaggagcgcgatcccgctaacatcaaatggggtgatgctggtgctgagtatgtcgtggagtctactggcgtcttcaccaccatggagaaggctggggctcacctgaagggtggtgccaaaagggtcatcatctccgccccttccgctgatgcccccatgtttgtgatgggtgtgaa

SEQ ID NO: 7252 - DNA, 398 bp, Cricetus cricetus
gaaccaagacaagtatgacaactccctcaagattgtcagcaatgcgtcctgcaccaccaactgcttagcccccctggccaaggtcatccatgacaactttggcattgtggaaggactcatgaccacggtccatgccatcactgccacccagaagactgtggatggcccctccggaaagctgtggcgtgatggccgtggggctgcccagaacatcatccctgcatccactggcgctgccaaggctgtgggcaaagtcatcccagagctgaacgggaagctgactggcatggccttccgtgttcctacccccaacgtgtccgttgtggatctgacatgtcgcctggagaaacctgccaagtatgaggacatcaagaaggtggtgaagcaggcatctgagg

SEQ ID NO: 7253 - DNA, 357 bp, Mus musculus
gaaatatgacaactcactcaagattgtcagcaatgcatcctgcaccaccaactgcttagcccccctggccaaggtcatccatgacaactttggcattgtggaagggctcatgaccacagtccatgccatcactgccacccagaagactgtggatggcccctctggaaagctgtggcgtgatggccgtggggctgcccagaacatcatccctgcatccactggtgctgccaaggctgtgggcaaggtcatcccagagctgaacgggaagctcactggcatggccttccgtgttcctacccccaatgtgtccgtcgtggatctgacgtgccgcctggagaaacctgccaagtatgatga

SEQ ID NO: 7254 - DNA, 401 bp, Rattus norvegicus
ccacgagaaatatgacaactccctcaagattgtcagcaatgcatcctgcaccaccaactgcttagcccccctggccaaggtcatccatgacaactttggcatcgtggaagggctcatgaccacagtccatgccatcactgccactcagaagactgtggatggcccctctggaaagctgtggcgtgatggccgtggggcagcccagaacatcatccctgcatccactggtgctgccaaggctgtgggcaaggtcatcccagagctgaacgggaagctcactggcatggccttccgtgttcctacccccaatgtatccgttgtggatctgacatgccgcctggagaaacctgccaagtatgatgacatcaagaaggtggtgaagcaggcggccgagggcccac

SEQ ID NO: 7255 - DNA, 328 bp, Bacillus subtilis
ttttgtgttagcagcggaaaaaatcttcaaaaaactagacgaatggagagattcatattcatttgtatccaaggtgctgaatcttggaggaggtttcggcattcgttatacggaagatgatgaaccgcttcatgccactgaatacgttgaaaaaattatcgaagctgtgaaagaaaatgcttcccgttacggttttgacattccggaaatttggatcgaaccgggccgttctctcgtgggagacgcaggcacaactctttatacggttggctctcaaaaagaagtggataagctgtacaatcgtttcatcattcggcgtgcgaattaa

SEQ ID NO: 7256 - DNA, 328 bp, Bacillus subtilis
atgacattgttcttacacggcacaagcagacaaaatcaacatggtcatttagaaatcggaggtgtggatgctctctatttagcggagaaatatggtacacctctttacgtatatgatgtggctttaatacgtgagcgtgctaaaagctttaagcaggcgtttatttctgcagggctgaaagcacaggtggcatatgcgagcaaagcattctcatcagtcgcaatgattcagctcgctgaggaagagggactttctttagatgtcgtatccggagagagctatatacggctgttgcagcaggctttccggcagaacgcatccactttca

SEQ ID NO: 7257 - DNA, 328 bp, Bacillus subtilis
tggaaacaataagagcagggaagaactgcggatggcgcttgagcaccgcatcggctgcattgtggtggataatttctatgaaatcgtcgcttcttgaagacctatgtaaagaaacgggtcactccatcgatgttcttcttcggatcacgcccggagtagaagcgcatacgcatgactacattacaacgggccaggaagattcaaagtttggtttcgatcttcataacggacaaactgaacgggccattgaacaagtattacaatcggaacacattcagctgctgggtgtccattgccatatcggctcgcaaatctttgatacggccgg

SEQ ID NO: 7258 - DNA, 449 bp, Bacillus subtilis
agtttgtcagtgaccatcccgagctgaatatcggggtcattgccaatgatatggcagcttctacatacgaattaaaaatcgtgaaacgggatatacaggattatagggacaatcatacaagatttgttatcctgtctcccgatgaaaacatatcttttgaagtgaattcaaaattgagctctaggcccaaaacgaccttaatggtcatgctgccgcaggatgatcagtccggggcgctgcatagagtgctgtctgcattttcttggagaaatttaaacctgtcaaaaattgagtcacgtccgactaaaaccggattaggccattatttctttattattgatattgagaaagcgtttgatgatgtattgattccaggggccatgcaggagcttgaagcactcggctgcaaagtgaggcttctgggtgcataccagtcttaccaattataa

SEQ ID NO: 7259 - DNA, 396 bp, Bacillus subtilis
atgaaagaggagacattttatcttgtccgtgaagatgtattgcccgatgcaatgagaaaaacattagaagtcaaaaagctgcttgatcgaaaaaaagcagattcagtagcagatgccgttcaaaaggtcgatttaagtagaagtgcgttttataaatacagggatgctgtttttccattctacaccatggtaaaagaacaaattatcacacttttctttcatttggaggataggtcaggtgcgttatctcagcttcttcaggcggtagctgattctggaagcaacgttctttccattcaccagaccattccgcttcaaggcagagcaaatgtgacactgtctatcagtacgtcggcaatggaagaagacattcatacattaatgaataagctcagg

SEQ ID NO: 7260 - DNA, 426 bp, Bacillus subtilis
ggttgaaatattaggttcaggtgcataagggagagaaaatcgtcatgaaagtcggttatttaggtccagcagctacatttacacatctagcagtcagttcttgttttcaaaacggcgccgaacatgttgcttaccgcaccattccggagtgtatagatgcagccgttgcaggcgaagttgattttgcttttgttcctttggaaaatgctttagaaggatctgttaatctaacaatagactatttaatacatgaacagcctttgccaatcgtgggtgaaatgacgttgccgattcaccagcacttgctcgtccatccctcaagagagaatgcatggaaagagctcgacaaaatttactcacattcacacgcgattgcgcaatgccataaatttcttcatcgacattttccttccgttccatatgaat

SEQ ID NO: 7261 - DNA, 670 bp, Mus musculus
ctttgaactcaatgggcagcttcgatccattctggttaaagacacccaggccatgaaggagatgcacttccatcccaaggctttgaaggatgtgaagggccaaattggggccccgatgcctgggaaggtcatagacatcaaggtggcagcaggggacaaggtggctaagggccagcccctctgtgtgctcagcgccatgaagatggagactgtggtgacttcgcccatggagggcactatccgaaaggttcatgttaccaaggacatgactctggaaggcgacgacctcatcctagagattgagtgatcttactccagcctggcagcctggccgaccctaccccaagcctctcaacagaagctgtgcagccagggcaggcccaggccagccagtacctgagagtaggaaggccaggcccttgaggtcctgtcccatgggacagcacacacactacctgcaatggcctgcccattcccttcagctatttgtccttttcttactggcaggtagttgctcacatattcatctcttgccaaataagggcctgctcctcgtgggagaccacaggtgtacagtcggtggccttgtacctgggggaggtggcttagggcttctacctctgggggtagagggaagacctaattcacaggtcctgggaaatttgctcaa

SEQ ID NO: 7262 - DNA, 986 bp, Rattus norvegicus
ggagggcctggagcctccctccctcccttgaacctgaaggagctggagaaggacctgattgataggcatggagaggaggtgaccccagaggacgttctctctgcagccatgtaccctgatgtctttgctcagttcaaagacttcacggctacctttggccccctggatagcctgaatactcgtctctttcttcaaggacccaaaattgcagaggagtttgaggttgagctggaacggggcaagaccttgcacatcaaagccctggctgtaagcgacctgaaccgtgctggccagaggcaggtgttctttgaactcaatgggcagcttcgatccattctggttaaagacacccaggccatgaaggagatgcacttccatcccaaggccttgaaggatgtgaagggccaaattggggcccctatgcctgggaaggtcatagacgtcaaggtggcagcaggagccaaggtggttaagggccagcccctctgtgtgctcagcgccatgaagatggagactgtggtgacttcgcccatggagggcactatccgaaaggttcacgtgaccaaggacatgactctggaaggcgatgacctcatcctagagattgagtgatcttactccagactggcagcctggccaaccctaccccaagcctctcaacagaagctgtgcagccagggcaggcccaggcagtacctgagggctaggccttgaggtcctgtcccatgggacagcacacacactacctgcaatggccctcccattcccttcagctatttgtccttgtcttgctggcaggcagttctcacatattcatctcttgccaaataagggtctgctcctcgtgggagaccacaggtgtacagtaggtggccttgtacctgggagaggggttctacctctgggggtagagggaagaagacctaattcataggtcctgggaaatttgctcaataaaagtggccttcccttgccctccacaaaaa

SEQ ID NO: 7263 - DNA, 670 bp, Mus musculus
aggtgcttggctggtacaagatgctgaagttccaaacagttcgagggggcctgaggctcctgggtgtccgccgatcctcctcggcccctgttgcctccccaaatgtccggcgtctggagtataagcctatcaagaaagtaatggtggccaacagaggtgagattgccatccgagtgtttcgtgcgtgcacagagctgggtatccgcacagtggctgtctactcggagcaggacacagggcagatgcacaggcagaaagctgatgaagcctaccttattggccgtggcctggcacctgtgcaggcctacctgcacattccagacatcatcaaggtggccaaggaaaatggtgtagatgcggtgcatcctggctatgggttcctctcagagcgagcagactttgcccaggcctgccaagatgctggagtccggttcattggtccaagcccagaggtggtccgcaagatgggagacaaggtggaagcccgggccattgccatcgctgcaggcgttccagtggtccccggcacggactcccccatcagctccctgcacgaggcgcatgagttctccaacaccttcggcttccctattatcttcaaggccgcctacggaggtgggggccgcggcatgcgggtcgtgcatagctatgaggagttggaagagaatta

SEQ ID NO: 7264 - DNA, 987 bp, Rattus norvegicus
cgcggcggccacggcttgaggcgacggggcgaagatgctgaagttccaaacagttcgagggggcctgaggctcctgggtgtccgccgatcctccacagcccccgttgcctccccaaatgtccggcgtctggagtacaagcccatcaagaaagtaatggtggccaacagaggtgagattgccatccgagtgtttcgtgcctgcacagagctgggtatccgcacagtggctgtctactcggagcaggacacaggccagatgcaccggcagaaagctgatgaagcctaccttattggccgtgggctggctcctgtgcaagcctacctgcacattccagacatcattaaggtggccaaggagaatggtgtagatgctgtgcaccctggctatgggttcctctcagagagagcagactttgcccaggcctgccaagatgctggagtccgattcattggtccaagcccagaggtggtccgcaagatgggagacaaggtggaagcccgggccattgccattgctgcaggcgttccagtggtccctggcactaattcccccatcaattccctgcatgaggcacacgagttctctaacacctatggtttccctattatcttcaaggctgcctatggaggtgggggccgtggcatgagggttgtgcatagctacgaggagctggaagagaattacacccgggcctaccctgaggccttggcagcctttgggaatggggcattgtttgtggagaaattcattgagaagccaagacacattgaggtgcagatcctaggggaccaatatgggaacatcttgcacttgtatgagcgggactgctccatccagcggcggcaccagaaggtggtagagattgcccctgctacccacctggacccccaacttcggtcacgcctcaccagtgactctgtcaaacttgccaagcaggttggctatgagaatgcaggcactgtggagttcctggtggacaagcatgg

SEQ ID NO: 7265 - DNA, 600 bp, Mus musculus
ccgcatcaatggctgtgccattcagtgtcgggtcaccaccgaggaccctgcacgcagcttccagccagacaccggccgcattgaggttttccggagtggtgagggcatgggcatccgcctggacaacgcctctgcattccagggcgctgtcatatcgccccactatgactctctgctcgtcaaggtcattgcacacggcaaagaccaccccacagctgccaccaagatgagcagagccctggccgagttccgtgtccgaggtgtaaagaccaacatccccttcctgcagaatgttctcaacaaccagcagttcctggcaggcacagtggacacccagttcatcgatgagaaccctgagctgttccagcttcggcctgcacagaaccgggcccagaagttgctacattacctcggacatgtcatggtgaatggccctaccactccaatccctgtcaatgtgagccccagtcctgtggatcctgctgttcctgtggtgcccataggcccacctccagctggtttcagggacatccttctgcgagaagggccagagggctttgcccgagctgtgcggaatcaccaggggctgctgttgatgga

SEQ ID NO: 7266 - DNA, 986 bp, Rattus norvegicus
caagcactacttcatcgaggtcaattcccgcctgcaggtggagcacacggtcactgaggagattacagatgtggacctggtccatgctcagatccatgtgtccgaaggccggagcctgcctgacctaggcctgcggcaggaaaacatccgaatcaatggttgtgccattcagtgtcgggtcaccactgaggaccctgcacgcagcttccagccagacactggccgcattgaggttttccggagtggtgagggcatgggcatccgcctggacaatgcctcagcattccagggagctgtcatatccccccactatgactccctgctcgtcaaagtcattgcccatggcaaagaccaccctacagctgccaccaagatgagcagagccctggcggagttccgtgtccgaggtgtaaagaccaacatccccttcctgcagaatgtgctcaacaaccagcagttcctagcgggcattgtggacacccagttcatcgatgagaaccccgagctgttccagctgcggcctgcacagaaccgggcccagaagttgctacattaccttggacacgtcatggtcaatggccctaccactccaatccccgtcaaggtcagtcccagccctgtggaccccattgttcctgtggtgcccataggcccacccccagctggtttcagagacatccttctgcgagaggggccagagggctttgccagagctgtgcggaatcaccaggggctgctgctaatggacacaaccttccgggatgcccaccagtcactacttgccactagagtgcgcacacacgatctcaaaaagattgcaccctacgttgcccacaacttcaacaacctcttcagcatagagaactggggaggagccacatttgacgtggccatgcgcttcttgtatgagtgcccctggcggcggctccaggagctccgggagctcatccccaacatcccattccagatgctactgaggggggcca

SEQ ID NO: 7267 - DNA, 579 bp, Cricetulus griseus
gctgatgttgtggatgtggcagtaaactccatgtctgggatgacttcacagcccacatgggtgccctggtggcttgtaccaaagggactcctctgaacacagaggtgcccctggagcgtgtgtttgactacagtgaatactgggaaggggctcggggcctgtatgcggcctttgactgcacggctaccatgaagtctggcaactcaaatgtgtatgaaaatgaaatcccagggggccagtacaccaacctacacttccaggcccacagcatggggcttggctccaagttcaaggaggtcaaaaaggcctatgtggaggctaaccaaatgctgggggacctcatcaaggtgacaccatcctccaagattgtgggggacctggcccagttcatggtgcaaaatgggttaagccgagcagaggctgaagctcaggcaaaagagctgtccttccctcgctctgtggtggaattcctgcagggctacattggaattccccatggaggcttccctgagcccttccgctctaaggtgctaaaggacctgccaagattagaggggaggcctggagcctcccttcctc

SEQ ID NO: 7268 - DNA, 630 bp, Mus musculus
atactcactggagtactacatgggcttagctgaagaactggtgcgagctggcactcacatcctgtgcattaaggacatggcgggcctgctgaagcctgccgcctgcaccatgctggtcagctccctccgggaccgattccccgacctcccactgcacatccatacccatgatacatcaggggcaggtgtggcagccatgctggcctgtgcacaagcaggggctgatgttgtggacgtggcagtagactccatgtctgggatgacctcacagccaagcatgggggccctggtggcctgtaccaaagggactcctttggacacagaggtacccctggagcgtgtgtttgactacagtgagtactgggaaggggctcggggactgtacgcagccttcgattgcacggctaccatgaagtctggcaactccgacgtgtatgagaatgagattccagggggccagtacaccaacctgcacttccaggcccatagcatggggcttggctccaagttcaaggaggtcaagaaggcctatgtggaggctaaccagatgctgggggacctcatcaaggtgacaccatcctccaagattgtgggggacctggcccagttcatggtgcagaatgggttgag

SEQ ID NO: 7269 - DNA, 986 bp, Rattus norvegicus
atgctgtgggctacaccaactaccctgacaacgtggtcttcaagttctgtgaggtggccaaagagaatggcatggacgtcttccggatctttgactcccttaactacctgccaaacatgctgctgggcatggaagcagctggcagtgctgggggtgtggtggaagctgccatctcctacacgggtgacgtggctgaccccagtcgcactaaatactcactggagtactacatgggcttagctgaagaactggtgcgagccggcactcacatcctctgcattaaggacatggcaggcctgctgaagcctgcagcatgcaccatgctggtcagctccctccgggaccggttccccgacctcccactgcacatccatacccatgacacatcagggtcaggtgtggcagccatgttggcctgtgcacaagctggggctgatgttgtggatgtggcagtcgactctatgtctgggatgacctcacagcccagcatgggggccctggtggcctgtaccaaagggactcctctggacacagaggtacccctggagcgtgtgtttgactacagtgagtattgggaaggggctcgggggctgtatgcagcctttgattgcacggctaccatgaagtctggcaactcagacgtgtatgagaatgaggatccagggggccagtacaccaacctacacttccaggcccacagcatgggacttggctccaagttcaaggaggtcaagaaggcctatgtggaggctaaccagatgctgggggacctcatcaaggtgacaccatcctccaagattgtgggggatctggcccagttcatggtgcagaacgggttgagccgggcagaggcagaagctcaggcagaagagctgtccttcccccgctctgtggtggagttcctgcagggctacattggcattccccatgggggtttccctgaacccttccgttctaaggtgctaaaggacctgccaaggatagaa

SEQ ID NO: 7270 - DNA, 604 bp, Bacillus subtilis
ggctgatgaattatgcggcttaaagctgtctgaagcggacaagctgcatttagcgagtctagaagaaggacacccggacaatgctggcgcttctctcgtcggcggacttgtgatcggcctgcatgaggatgacgagacccaaatgatccgcgtcccgaatgctgacattgacgtagtcgttgtcattcctttttatgaagtgctgacaagagacgcgagagacgtgcttccgaaggagtttccatatgccgatgccgtaaaagcaagtgctgtcagcaatatcctcattgctgcgatcatgtccaaggattggccgcttgtcgggaaaatcatgaagaaggatatgttccatcagccgtaccgggcgatgcttgtgcctgagctgtcaaaagtagagcacgtcgccgagatgaagggcgcatatggaacggctctcagcggagcaggcccaacgattctcgtcatgaccgaaaaaggaaagggagaagagctaaaagaacagctcgcgcttcatttccctcattgtgaagtagacgctttgaccgttccgaaagagggaagtataatagagcgaaatcctttatatcaagtaaaaagtgtatag

SEQ ID NO: 7271 - DNA, 718 bp, Bacillus subtilis
atgtggaaaggacttatccatcaatataaagaatttttacctgtaacagatcaaacaccggcgctaactttacatgaaggaaacacacctcttattcacctgccgaagctgtctgagcagctcggaattgagcttcatgtcaaaacggaaggcgtcaatcctacgggatcatttaaagatcgcggaatggttatggctgtggcaaaggcaaaagaagaaggcaatgacacgattatgtgcgcgtcaacaggtaacacttccgctgctgcggcagcatatgcagcccgtgctaacatgaaatgcattgtcatcatcccgaacggaaaaattgcatttggaaaactcgctcaagctgtcatgtacggagccgagattatcgcaattgacggaaactttgacgatgcgcttaaaattgtccgttccatctgtgagaaatcaccgattgcccttgtcaactcagtcaacccttaccgcattgaaggccaaaaaactgctgccttcgaagtgtgcgaacagctgggggaagcgcctgatgttttagcgatcccggtcggaaatgctggaaacatcactgcgtactggaagggcttcaaggaatatcatgagaaaaacggcacaggccttccgaaaatgcgcggctttgaagctgagggtgcggcggcaatcgtgcgcaatgaagtgattgaaaatccggaaacaatagcgacagccattcgta

SEQ ID NO: 7272 - DNA, 604 bp, Bacillus subtilis
ctgtaaaggcagccgaggaatccaatgggaaaattgacgaagtcactgatgatgaaatccttcacgcatatcagctgatcgcccgtgtagaaggcgtgtttgcagaaccaggttcttgcgcgtctatcgcaggagtgctgaaacaggtgaaatccggagaaattccgaaaggcagcaaggtcgtagctgtgttaacaggaaacggactgaaagatccgaacacagcggtcgacatttcagaaatcaagcctgtcacattgccgactgatgaagacagcatccttgaatatgtaaaaggagcggcccgtgtatgaacgaagccgacatgctgttctctgtcactgttcccggaagcacagctaacctaggccccggctttgattcagtcggaatggcgctcagcagatatttgaagctgaccgtctttgaaagcgacaaatggtcttttgaggctgaaacagaaacagtcgccggaattcgcggtacagataacctgatctaccaagtggctaaacggaccgcagatttgtacggaaaagaaatgcctcctgtccatgtgaaggtgtggagcgacatcccgcttgcacgcggccttggcagcagc

SEQ ID NO: 7273 - DNA, 820 bp, Cricetulus griseus
cccagcagtttctttctggttttgtgagaatgaggactatccttatttggacactaatttggatacctatgagaaactaattcagaaagttcctcagctgaacaaaatggttcgtgcagcagcagaagtagctggtcagttcataattaaacttacccatgacattgaactgaacctggactatgatatgtataacaacaagatactgtcatttgtgaaggagctgaaccaattcagagcagatatcaaggcaatgggtctgagtctacagtggctgtattctgctcgtggagactttttccgtgctacatctagactgacgactgatttccataatgctgagaaaacaaacagatttgtcgtgagggaaatcaataaccgtattatgaaagtggaatatcacttcctgtcaccctacgtatctccaagagagtctcctttccgacacatcttctggggttccggctctcacactctcacggctttagtggagaacttgaagcttcgtcagaaaaacagtagtgcttttaacgaaacactcttcagaaaccagttggccctagctacttggactattcagggagttgcaaatgccctctctggtgacatttgggatattgacaatgagttttaaatgtaacataattaaataagagcagggcagtctgtttctagacttgtactggttgtgctaaattttcattagagctcaaatctaatgttataattctacccgatcatcctgatactaaatgtctttaggcagcagcttttagtgcagggttggacctacacttgaagttacagtggataacacttt

SEQ ID NO: 7274 - DNA, 600 bp, Mus musculus
tgtgaggatgcagactatccttatttgggcactagattggatacctatgaggcattgactcagaaagttcctcagctcaaccaaatggttcgtacagcagcggaagtggctggtcagctcattattaaacttacccatgacgttgaattgaacctggactatgagatgtataacagcaaactactgtcatttatgaaggatctgaaccagttcaaaacagatatcagggatatgggtctaagtctacagtggctgtattccgctcgtggagactacttccgtgctacttctagactaacaactgattttcataatgctgagaaaacaaacagatttgtcatgagggaaatcaatgatcgtattatgaaagtggagtatcacttcctgtcgccctatgtatctccaagagagtctcctttccgacatatcttctggggctctggctctcacactctctcagctttagtggagaacttgaagcttcgtcaaaaaaatattactgcttttaatgaaaccctcttcagaaaccagttggccctggctacttggactattcagggagtcgcaaatgccctctctggtgacatttggaatattgac

SEQ ID NO: 7275 - DNA, 1137 bp, Rattus norvegicus
ctccaattgagctgtatgcctgaaggatttagctggcttccattcccctaaagtagacagttacttttcagaagaggtgcaacttgttttcttgccagcaaggttgaactaggtccttctgctggataaaagaaaggaagtttgtctgtttacaggaataaggccttattggtttaacctttgtgttatttaggatgagaccagaagccaaagacttcaagttttctctccactgtcatctacccagtagtctttagttctttgggttgttttgtttttgttttgtttttcttttccaacactttctgaaaaagaacaggtttagactcagtctgtcagcagaacacactgccgagctcggtacccggggatcctctagagtcgacctgcaggcatgcaagctttccctatagtgagtcgtattagagcttggtgcatgcctgcaggtcgactctagaggatccccgggtaccgagctctggccaaagtgctggtcttcagggaagctctgtcgtttttggcactgagatatttattgtttatttatcagtgacagagttcactataaatagtgtttttttaatagaagataattatcggaagcagtgccttccataattatgacagttatactgtcgttttcttttaataaaagcagcatctgctaatgagacccacagatactggaagttttgcacttacggtcagcacttgcgggctttagaaaggagaaagccacaagccaaacaatatccgatgagctagaagaggattgggttaaataagagattcctagttgagttggaaaaaaatgataattctaagtccagtgagttgtggccaagttaaatgtcatttaaaggctatgatagtacatcaacaaaattctatagctcagtttattcaagatgtaactcaaatccaattttgcaaaatttccagtacctttgtcacaaacttaactcacattatcgggagcagtgtcttccataatgtataaagaacaaggtagtttttgcctaccacagtgtctatatcggagacagtgacctccatatgttacactaagggtgtacgtaattatcgggaacagtgtttcccataattttcttcatgcgatgacatcttcaaagcttg

SEQ ID NO: 7276 - DNA, 820 bp, Cricetulus griseus
atgatggatcaagccagatcagcaatctctaacttgtttggtggagaaccattgtcatacacccggtttagcctggctcggcaagtagatggagataacagtcacgtggagatgaaattggctgtagatgaagaagaaaacactgacaataacatgaaggccagtgtccgaaaacatagaaggcttaatggaagactctgctttgggacaattgcagtagtcatctttttcttgattggatttatgattggctacctaggctattgtaaacgcacagaacaaaaagactgtgtaagactggcagaaacggagacaggcaattcagaaatcatccaagaagaaaacattcctcaatcttctcgcttatattgggcagacctcaaaaaactgttgtcagagaagctggatgccatagagttcactgacaccatcaagcagctgagccagacctctcgggaggcaggatctcaaaaagatgaaaatcttgcctattatattgaaaatcagttccgtgactttaaactcagcaaagtctggcgagatgaacattatgtgaagattcaggtgaaaggcagtgctgctcaaaacgcggtgaccataataaatgtaaatggtgactcagacctagtggagaatcctgggggctatgtggcatatagtaaagctacaacagtttctggtaaactgatccatgctaattttggcactaaaaaagactttgaagatttaaagtatcctgtgaatggatctttagtgattgttagagcagggaaaatcacttttgcagaaaaggttgcaaatgcccaaagctttaatgcaa

SEQ ID NO: 7277 - DNA, 600 bp, Mus musculus
aagccagatcagcattctctaacttgtttggtggggaaccattgtcatacacccggtttagccttgctcggcaagtagatggagataacagtcatgtggagatgaaactggctgcagatgaagaagaaaatgccgacaataacatgaaggctagtgtcagaaaacccaagaggtttaatggaagactctgctttgcagctattgcactagtcattttcttcttgattggattcatgagtggctacctgggctattgtaagcgtgtagaacaaaaagaggagtgtgtgaaactggctgaaacggaggagacagacaagtcagaaaccatggaaacagaggatgttcctacatcatctcgcttatattgggcagacctcaaaacactgttgtcagagaagttgaactccatagagtttgctgacaccatcaagcagctgagccagaatacatacactcctcgtgaggctggatctcaaaaagatgaaagtcttgcctattatattgaaaatcagttccatgaatttaaattcagcaaagtctggcgagatgaacactatgtgaagattcaagtgaaaagcagcattggtcaaaacatggtga

SEQ ID NO: 7278 - DNA, 1137 bp, Rattus norvegicus
catagagttcactgacatcatcaagcagctgagccagaatacatatactcctcgtgaggctggatctcagaaagacgagaatcttgcctattatattgaaaatctgttccatgactttaaattcagcaaagtctggcgagatgaacattatgtgaagattcaagtgaaaaacagtgtttctcaaaacttggtgaccataaattcaggtagtaacattgacccagtggaggctcctgagggttatgtggcatttagtaaagctggagaagttactggtaaactggtccatgctaattttggcactaaaaaggactttgaagaattaaattattctgtgaatggatctttagtgattgttagagcagggaaaattacttttgcagaaaaggttgcaaatgcccaaagctttaatgcaattggtgtcctcatctacatggacaggaatacgttccccgttgttgaggcagaccttcaattctttggacatgctcatctaggaactggggatccatatacacctggctttccttctttcaaccatactcagtttccgccatctcagtcatctggattgccttctatacctgtgcagacgatctcaagagctcctgcagaaaagctattcaaaaacatggaaggaaactgtcctcctagttggaatatagattcctcatgtaagctggaactttcacagaatcaaaatgtgaagctcactgtgaacaatgtactgaaagaaacaagaatacttaacatctttggcgttattaaaggctatgaggaaccagaccgctacattgtagtaggagcccagagagacgcttggggccctggtgttgcgaagtccagtgtgggaacaggtcttctgttgaaacttgcccaagtattctcagatatgatttcaaaagatggatttagacccagcaggagtattatctttgccagctggactgcaggagactatggagctgttggtccgactgagtggctggaggggtacctttcatctttgcatctaaaggctttcacttacattaatctggataaagtcgtcctgggtactagcaacttcaaggtttctgccagccccctattatatacacttatggggaagataatgcaggacgtaaagcatccgat

SEQ ID NO: 7279 - DNA, 820 bp, Cricetulus griseus
ttggtgtcctgatatacatggaccagactaaattccctgttgttgaagcagaactttcactctttggacatgctcatctaggaactggtgatccatacacacctgggtttccatctttcaatcatactcagtttcctccatctcagtcatcaggattacctagtatacctgttcagacgatctcaagaaaggctgcagaaaagctatttcaaaacatggaaacaaactgtcctcctagttggaacacagattctttgtgtaagctagaatcttcacagggtataaatgtgaacctctctgtgaacaacgtgctgaaagaaacaagaatacttaacatctttggagttattaaaggatttgaggaaccagaccggtacattgtagtaggtgcccagagagatgcctggggtcctggtgctgcaaaatccagtgtgggaacaggtcttctgttgaaacttgcccaagcattctcagatatggtttcaagaggtgggtttaaacccagcagaagcattatctttgccagctggagtgcaggagacttcggagctgttggtgccaccgagtggctagagggatacctttcatctctgcatttgaaagctttcacttatattaatctggataaagttgtccttggtactagaaacttcaaggtttctgccagccctctattatatacacttattgagaagacaatgcaggacgtaagacatccaattgatgggaaacctctctatcgagacagcaattggatcagcaaagttgaggatctttcccttgacaatgctgctttcccctttcttgcatattctggaat

SEQ ID NO: 7280 - DNA, 600 bp, Mus musculus
gacaagaataaattccccgttgttgaggcagaccttgcactctttggacatgctcatctaggaactggtgatccatacacacctggctttccttctttcaatcatactcagtttccgccatctcagtcatcagggttgcctaatatacctgtgcaaacaatctcaagagctgctgcagaaaagctatttggaaaaatggaaggaagctgtcctgctagatggaacatagattcttcatgtaagctggaactttcacagaatcaaaatgtgaagctcattgtgaaaaacgtactgaaagaaagaagaatacttaacatctttggagttattaaaggttatgaggaaccagaccgttatgttgtagtaggagcccagagagacgctttgggtgctggtgttgcggcgaagtccagtgtgggaacaggtcttctgttgaaacttgcccaagtattctcagatatgatttcaaaagatggatttagacccagcagaagtataatctttgccagctggactgcaggcgactttggagctgttggtgccactgagtggttggagggatacctttcatctttgcatttaaaagctttcacttatatt

SEQ ID NO: 7281 - DNA, 1137 bp, Rattus norvegicus
gatggaaaatatctatatcgaaacagtaattggattagcaaaattgaggaactttccttggacaatgctgcattcccttttcttgcatattcaggaatcccagcagtttctttctgtttttgtgaggatgaggactatccttatttgggcactaaactagatacctatgagatattaattcagaaagttcctcagctcaaccaaatggttcgtacagcagcagaggtggccggtcagttcattattaaacttacccatgacattgagttgaccctggactatgagatgtacaacagcaaactactgtcatttatgaaggatctgaaccagttcaaagcagatataaaagatatgggtctaagtctacaatggctgtattctgctcgtggagactacttccgtgctacttctagactaacaactgattttcataatgctgagaaaacaaacagattcgtcatgagggaaatcaatgatcgtattatgaaagtggagtatcacttcctgtcaccctatgtatctccaagagagtctcctttccgacacatcttctggggctctggctctcacaccctctcagctttagtggagaacctgagacttcgtcagaaaaatatcactgctttcaatgaaacgctcttcagaaaccagttggccctggctacgtggactattcagggagttgcaaatgccctctctggtgacatttggaatattgacaatgagttttaaatgtaatgtgcataattaagtgagagagggtagtctgtttctagacttgagctggttgtgctaaattttcattagagctcgaattaatgttaaaaattctacccaatcatctaatgtgtttaggcagcagcttttagtgcagggttggacccacacttcaagttacagtggacaacactttccatgttcatgataccttcttagattatctttagaattttgagtcttttgtaataccttgctctttgcttcatggtcatgaaaatgtcagaaccagttgtaagaacattgctataagtcctgagggcactactagtatcttgaggtgggaggaagagggtgtatgtgaggggcagagtggtcgctgggtgtgattccccatctccatctgaccctcactgggat

SEQ ID NO: 7282 - DNA, 600 bp, Bacillus subtilis
ttaacatttgtcaatgaacatggggcgcgagctgtacttatcggtgaatcattgatgagacaaacttctcagcgtaaagcaatccatgctttgtttagggagtgaggttgtgaagaaaccggcattaaaatattgcggtattcggtcactaaaggatttgcagcttgcggcggaatcacaggctgattacctaggatttatttttgctaaaagcaaacgaaaagtatctccggaagatgtgaaaaaatggctgaaccaagttcgtgtcgaaaaacaggttgcaggtgtttttgttaatgaatcaatagagacgatgtcacgtattgccaagagcttgaagctcgacgtcattcagcttcacggtgatgaaaaaccggcggatgctgctgctcttcgcaagctgacaggctgtgaaatatggaaggcgcttcaccatcaagataacacaactcaagaaatagcccgctttaaagataatgttgacggctttgtgattgattcatctgtaaaagggtctagaggcggaactggtgttgcattttcttgggaatgtgtgccggaatatcagcaggcggctattggtaaacgctgttttatcgc

SEQ ID NO: 7283 - DNA, 600 bp, Bacillus subtilis
caccgagagagacatacggcgggtgtattgcctacattgggtttgacgggaatatcgactcttgtattacgattcgcacgatgagtgtaaagaacggtgttgcatcgatacaggcaggtgctggcattgttgctgattctgttccggaagccgaatacgaagaaagctgtaataaagccggtgcgctgctgaaaacgattcatattgcagaagacatgtttcatagcaaggaggataaagctgatgaacagatttctacaattgtgcgttgacggaaaaacccttactgccggtgaggctgaaacgctgatgaatatgatgatggcagcggaaatgactccttctgaaatgggggggatattgtcaattcttgctcatcggggggagacgccagaagagcttgcgggttttgtgaaggcaatgcgggcacacgctcttacagtcgatggacttcctgatattgttgatacatgcggaacagggggagacggtatttccacttttaatatctcaacggcctcggcaattgttgcctcggcagctggtgcgaaaatcgctaagcatggcaatcgctctgtctcttctaaaagcggaagcgct

SEQ ID NO: 7284 - DNA, 593 bp, Bacillus subtilis
aaaggacggagagcgccgggaatataccgtttcacccgaagatttcggtttcacaaatggcagacttgaagatttacaggtgcagtcaccgaaagagagcgcctatctcattcagaatatttttgaaaataaaagcagcagttccgctttatctattacggcttttaatgcgggagctgcgatttacacggcgggaattaccgcctcactgaaggaaggaacggagctggcgttagagacgattacaagcggaggcgctgccgcgcagcttgaacgactaaagcagaaagaggaagagatctatgcttgaaaaaatcatcaaacaaaagaaagaagaagtgaaaacactggttttgccggtagagcagcctttcgagaaacgttcatttaaggaggcgctggcaagcccgaatcggtttatcgggttgattgccgaagtgaagaaagcatcgccgtcaaaagggcttattaaagaggattttgtgcctgtgcagattgcaatagactatgaggctgcgaaggcagatgcgatttccgttttaacagacaccccgttttttcaaggggaaaacagttatttatcagacgtaaag

SEQ ID NO: 7285 - DNA, 12 bp, artificial
  six-frame stop sequence
ctaactaattag
